(19) United States
(12) Patent Application Publication
(10) Pub. No.: US 2021/0196766 A1
(43) Pub. Date: Jul. 1, 2021

(54) DESIGNED BACTERIAL COMPOSITIONS AND USES THEREOF

(71) Applicant: Seres Therapeutics, Inc., Cambridge, MA (US)

(72) Inventors: Asuncion MARTINEZ, Arlington, MA (US); Edward J. O'BRIEN, Arlington, MA (US); Sheri Lynn SIMMONS, Brookline, MA (US); David COOK, Brookline, MA (US); Matthew R. HENN, Cambridge, MA (US); Christopher B. FORD, Swampscott, MA (US); Divya BALASUBRAMANIAN, Arlington, MA (US); Ambar PIÑA, Boston, MA (US); Liyang DIAO, Belmont, MA (US); Meghan CHAFEE, Acton, MA (US); Marin VULIC, Boston, MA (US); Madhumitha NANDAKUMAR, Belmont, CA (US); Sumon DATTA, Cambridge, MA (US); Latta JAYARAMAN, Cambridge, MA (US)

(73) Assignee: Seres Therapeutics, Inc., Cambridge, MA (US)

(21) Appl. No.: 17/058,351

(22) PCT Filed: May 24, 2019
(86) PCT No.: PCT/US2019/034069

§ 371 Date: Nov. 24, 2020

(51) Int. Cl. A61K 35/742; A61K 47/26; A61K 9/00; A61P 1/00; A61P 37/06; A61P 35/00; A61K 39/395; A61K 35/744; A61K 35/745

(52) U.S. Cl. CPC A61K 35/742; A61K 47/26; A61K 9/0053; A61P 1/00; A61K 2035/115; A61P 35/00; A61K 39/3955; A61K 35/744; A61K 35/745; A61P 37/06

(57) ABSTRACT

Our client, Seres Therapeutics, has asked us to file a new provisional application related to bacterial compositions and the use of such compositions for the treatment of inflammatory bowel disease.

### REFERENCE TO SEQUENCE LISTING SUBMITTED ELECTRONICALLY VIA EFS-WEB

[0001] The content of the electronically submitted sequence listing in ASCII text file (Name: 4268.016PC01_SequenceListing_ST25.txt; Size: 836,765 bytes; and Date of Creation: May 24, 2019) filed with the application is herein incorporated by reference in its entirety.

### FIELD OF THE DISCLOSURE

[0002] The present disclosure relates to bacterial compositions designed to have certain functional features that are useful for treating and/or preventing a range of diseases and disorders, such as those associated with dysbiosis of the gastrointestinal microbiome (e.g., inflammatory bowel disease (IBD), for example, ulcerative colitis and certain cancers).

### BACKGROUND OF THE DISCLOSURE

[0003] A healthy gut microbiota is essential for the overall well-being of an individual. Accordingly, dysbiosis of the gut microbiota has been implicated in the pathogenesis of many diseases and disorders, such as inflammatory bowel disease (e.g., colitis), irritable bowel syndrome, coeliac disease, allergy, asthma, metabolic syndrome, cardiovascular disease, and obesity. Carding, S. et al., Micro Ecol Health Dis 26 (2015).

[0004] Methods of treating a dysbiosis-related condition have included fecal microbiome transplantation (FMT), which can provide microorganisms to the gastrointestinal tract (GI). However, fecal transplant presents a number of issues, including those related to safety and methods of delivery, such as naso-duodenal-, transcolonoscopic-, or enema-based methods that generally require in-clinic procedures and may introduce adverse events. Treatments using FMT have a likelihood of being inherently inconsistent because of the variability between individuals donating the feces for transplant. FMT methods also introduce a risk of infection by pathogenic organisms, including viruses, bacteria, fungi and protists in the source material. Furthermore, there can be issues related to the stability and storage of donated feces, for example, related to the survival of bacterial species. Some treatments using fecal bacteria delivered in capsules have required that patients take large numbers of capsules, which can be difficult for people with GI illnesses and may reduce compliance with complete treatment.

[0005] Accordingly, there is a need for compositions that deliver a consistent product containing cultured bacteria that are of sufficient complexity and that can exhibit key functional features that are useful for the treatment of a dysbiosis or dysbiosis-related condition.

### SUMMARY OF THE DISCLOSURE

[0006] Provided herein is a composition comprising a first purified bacterial population and a second purified bacterial population, wherein the first purified bacterial population comprises one or more bacteria selected having a 16S rDNA sequence that is at least 97%, at least 97.5%, at least 98%, at least 98.5%, at least 99%, at least 99.5%, or 100% identical to a 16S rDNA sequence set forth in SEQ ID NO: 215, SEQ ID NO: SEQ ID NO: 112, SEQ ID NO: 113, SEQ ID NO: 114, SEQ ID NO: 115, SEQ ID NO: 116, SEQ ID NO: 188, SEQ ID NO: 212, SEQ ID NO: 160, SEQ ID NO: 186, SEQ ID NO: 203, SEQ ID NO: 104, SEQ ID NO: 208, SEQ ID NO: 189, SEQ ID NO: 187, SEQ ID NO: 207, SEQ ID NO: 190, SEQ ID NO: 191, SEQ ID NO: 211, SEQ ID NO: 209, SEQ ID NO: 110, SEQ ID NO: 150, SEQ ID NO: 175, SEQ ID NO: 158, SEQ ID NO: 210, or SEQ ID NO: 106, and wherein the second purified bacterial population comprises one or more bacteria having one or more features selected from the group consisting of: (i) capable of engrafting when administered to a subject, (ii) capable of having anti-inflammatory activity, (iii) not capable of inducing pro-inflammatory activity, (iv) capable of producing a secondary bile acid, (v) capable of producing a tryptophan metabolite, (vi) capable of restoring epithelial integrity as determined by a primary epithelial cell monolayer barrier integrity assay, (vii) capable of being associated with remission of an inflammatory bowel disease, (viii) capable of producing a short-chain fatty acid, (ix) capable of inhibiting a HDAC activity, (x) capable of producing a middle-chain fatty acid, (xi) capable of expressing catalase activity, (xii) capable of having alpha-fucosidase activity, (xiii) capable of inducing Wnt activation, (xiv) capable of producing a B vitamin, (xv) capable of modulating host metabolism of endocannabinoid, (xvi) capable of producing a polyamine and/or modulating a host metabolism of a polyamine, (xvii) capable of reducing fecal levels of a sphingolipid, (xviii) capable of modulating host production of kynurenine, (xix) capable of reducing fecal calprotectin level, (xx) not capable of activating a toll-like receptor pathway (e.g., TLR4 or TLR5), (xxi) capable of activating a toll-like receptor pathway (e.g., TLR2), and (xxii) any combination thereof.

[0007] Also provided herein is a composition comprising a first purified bacterial population and a second purified bacterial population, wherein the first bacterial population comprises one or more bacteria having a 16S rDNA sequence that is at least 97%, at least 97.5%, at least 98%, at least 98.5%, at least 99%, at least 99.5%, or 100% identical to a 16S rDNA sequence set forth in SEQ ID NO: 118, SEQ ID NO: SEQ ID NO: 166, SEQ ID NO: 167, SEQ ID NO: 168, SEQ ID NO: 169, SEQ ID NO: 176, SEQ ID NO: 177, SEQ ID NO: 178, or SEQ ID NO: 137, and wherein the second purified bacterial population comprises one or more bacteria having one or more features selected from the group consisting of: (i) capable of engrafting when administered to a subject, (ii) capable of having anti-inflammatory activity, (iii) not capable of inducing pro-inflammatory activity, (iv) capable of producing a secondary bile acid, (v) capable of producing a tryptophan metabolite, (vi) capable of restoring epithelial integrity as determined by a primary epithelial cell monolayer barrier integrity assay, (vii) capable of being associated with remission of an inflammatory bowel disease, (viii) capable of producing a short-chain fatty acid, (ix) capable of inhibiting a HDAC activity, (x) capable of producing a middle-chain fatty acid, (xi) capable of expressing catalase activity, (xii) capable of having alpha-fucosidase activity, (xiii) capable of inducing Wnt activation, (xiv) capable of producing a B vitamin, (xv) capable of modulating host metabolism of endocannabinoid, (xvi) capable of producing a polyamine and/or modulating a host metabolism of a polyamine, (xvii) capable of reducing fecal levels of a sphingolipid, (xviii) capable of modulating host production of kynurenine, (xix) capable of reducing fecal calprotectin level, (xx) not capable of activating a toll-like receptor pathway (e.g., TLR4 or TLR5), (xxi) capable of activating a toll-like receptor pathway (e.g., TLR2), and (xxii) any combination thereof.

[0008] Provided herein is also composition comprising a first purified bacterial population and a second purified bacterial population, wherein the first bacterial population comprises one or more bacteria having a 16S rDNA sequence that is at least 97%, at least 97.5%, at least 98%, at least 98.5%, at least 99%, at least 99.5%, or 100% identical to a 16S rDNA sequence set forth in SEQ ID NO: 117, SEQ ID NO: 137, SEQ ID NO: 111, or SEQ ID NO: 103, and wherein the second purified bacterial population comprises one or more bacteria having one or more features selected from the group consisting of: (i) capable of engrafting when administered to a subject, (ii) capable of having anti-inflammatory activity, (iii) not capable of inducing pro-inflammatory activity, (iv) capable of producing a secondary bile acid, (v) capable of producing a tryptophan metabolite, (vi) capable of restoring epithelial integrity as determined by a primary epithelial cell monolayer barrier integrity assay, (vii) capable of being associated with remission of an inflammatory bowel disease, (viii) capable of producing a short-chain fatty acid, (ix) capable of inhibiting a HDAC activity, (x) capable of producing a middle-chain fatty acid, (xi) capable of expressing catalase activity, (xii) capable of having alpha-fucosidase activity, (xiii) capable of inducing Wnt activation, (xiv) capable of producing a B vitamin, (xv) capable of modulating host metabolism of endocannabinoid, (xvi) capable of producing a polyamine and/or modulating host metabolism of a polyamine, (xvii) capable of producing a sphingolipid, (xviii) capable of modulating host production of kynurenine, (xix) capable of reducing fecal calprotectin level, (xx) not capable of activating a toll-like receptor pathway (e.g., TLR4 or TLR5), (xxi) capable of activating a toll-like receptor pathway (e.g., TLR2), and (xxii) any combination thereof.

[0009] In some embodiments, the one or more features are selected from (i) capable of engrafting when administered to a subject; (ii) capable of having anti-inflammatory activity, (iii) not capable of inducing pro-inflammatory activity, (iv) capable of producing a secondary bile acid, (v) capable of producing a tryptophan metabolite, (vi) capable of restoring epithelial integrity as determined by a primary epithelial cell monolayer barrier integrity assay, (vii) capable of being associated with remission of an inflammatory bowel disease, (viii) capable of producing a short-chain fatty acid, (ix) capable of inhibiting a HDAC activity, (x) capable of producing a middle-chain fatty acid, or (xi) any combination thereof.

[0010] In some embodiments, the second purified bacterial population comprises a long-term engrafter and/or a transient engrafter. In certain embodiments, the second purified bacterial population comprises two, three, four, five, six, seven or more long-term engrafters. In further embodiments, the second purified bacterial population comprises two, three or more transient engrafters. In certain embodiments, a combination of the first purified bacterial population and the second purified bacterial population comprises three or more transient engrafters and/or seven or more long-term engrafters.

[0011] In some embodiments, the second purified bacterial population comprises one or more bacteria that are capable of producing a tryptophan metabolite. In some embodiments, the second purified bacterial population comprises one or more bacteria that are capable of producing a secondary bile acid. In some embodiments, the second purified bacterial population comprises one or more bacteria that are capable of having anti-inflammatory activity. In certain embodiments, the second purified bacterial population comprises one or more bacteria that are not capable of inducing pro-inflammatory activity. In some embodiments, the second purified bacterial population comprises one or more bacteria that are capable of producing a short-chain fatty acid. In some embodiments, the second purified bacterial population comprises one or more bacteria that are capable of producing a medium-chain fatty acid. In some embodiments, the second purified bacterial population comprises one or more bacteria that are capable of inhibiting HDAC activity.

[0012] Also provided herein is a composition comprising a purified bacterial population, wherein the composition comprises one or more features selected from the group consisting of: (i) capable of engrafting when administered to a subject, (ii) capable of having anti-inflammatory activity, (iii) not capable of inducing pro-inflammatory activity, (iv) capable of producing a secondary bile acid, (v) capable of producing a tryptophan metabolite, (vi) capable of restoring epithelial integrity as determined by a primary epithelial cell monolayer barrier integrity assay, (vii) capable of being associated with remission of an inflammatory bowel disease, (viii) capable of producing a short-chain fatty acid, (ix) capable of inhibiting a HDAC activity, (x) capable of producing a middle-chain fatty acid, (xi) capable of expressing catalase activity, (xii) capable of having alpha-fucosidase activity, (xiii) capable of inducing Wnt activation, (xiv) capable of producing a B vitamin, (xv) capable of modulating host metabolism of endocannabinoid, (xvi) capable of producing a polyamine and/or modulating a host metabolism of a polyamine, (xvii) capable of reducing fecal levels of a sphingolipid, (xviii) capable of modulating host production of kynurenine, (xix) capable of reducing fecal calprotectin level, (xx) not capable of activating a toll-like receptor pathway (e.g., TLR4 or TLR5), (xxi) capable of activating a toll-like receptor pathway (e.g., TLR2), and (xxii) any combination thereof.

[0013] In some embodiments, the one or more features are selected from (i) capable of engrafting when administered to a subject; (ii) capable of having anti-inflammatory activity, (iii) not capable of inducing pro-inflammatory activity, (iv) capable of producing a secondary bile acid, (v) capable of producing a tryptophan metabolite, (vi) capable of restoring epithelial integrity as determined by a primary epithelial cell monolayer barrier integrity assay, (vii) capable of being associated with remission of an inflammatory bowel disease, (viii) capable of producing a short-chain fatty acid, (ix) capable of inhibiting a HDAC activity, (x) capable of producing a middle-chain fatty acid, or (xi) any combination thereof.

[0014] In some embodiments, the purified bacterial population of a composition disclosed herein comprises one or more bacteria having a 16S rDNA sequence that is at least 97%, at least 97.5%, at least 98%, at least 98.5%, at least 99%, at least 99.5%, or 100% identical to a 16S rDNA sequence set forth in SEQ ID NO: 215, SEQ ID NO: 112, SEQ ID NO: 113, SEQ ID NO: 114, SEQ ID NO: 115, SEQ ID NO: 116, SEQ ID NO: 188, SEQ ID NO: 212, SEQ ID NO: 160, SEQ ID NO: 186, SEQ ID NO: 104, SEQ ID NO: 208, SEQ ID NO: 189, SEQ ID NO: 187, SEQ ID NO: 207, SEQ ID NO: 190, SEQ ID NO: 191, SEQ ID NO: 211, SEQ ID NO: 209, SEQ ID NO: 110, SEQ ID NO: 159, SEQ ID NO: 175, SEQ ID NO: 158, SEQ ID NO: 210, or SEQ ID NO: 106.

[0015] In some embodiments, the purified bacterial population comprises one or more bacteria having a 16S rDNA sequence that is at least 97%, at least 97.5%, at least 98%, at least 98.5%, at least 99%, at least 99.5%, or 100% identical to a 16S rDNA sequence set forth in SEQ ID NO: 185, SEQ ID NO: 183, SEQ ID NO: 161, SEQ ID NO: 206, SEQ ID NO: 102, SEQ ID NO: 214, SEQ ID NO: 184, SEQ ID NO: 204, SEQ ID NO: 216, SEQ ID NO: 217, SEQ ID NO: 218, SEQ ID NO: 219, SEQ ID NO: 220, SEQ ID NO: 221, SEQ ID NO: 222, SEQ ID NO: 223, SEQ ID NO: 224, SEQ ID NO: 225, SEQ ID NO: 226, SEQ ID NO: 227, SEQ ID NO: SEQ ID NO: 166, SEQ ID NO: 167, SEQ ID NO: 168, SEQ ID NO: 169, SEQ ID NO: 109, SEQ ID NO: 138, SEQ ID NO: 139, SEQ ID NO: 140, SEQ ID NO: 141, SEQ ID NO: 142, SEQ ID NO: 143, SEQ ID NO: 144, SEQ ID NO: 145, SEQ ID NO: 146, SEQ ID NO: 147, SEQ ID NO: 192, SEQ ID NO: 176, SEQ ID NO: 177, SEQ ID NO: 178, SEQ ID NO: 107, SEQ ID NO: 137, SEQ ID NO: 198, SEQ ID NO: 199, SEQ ID NO: 200, SEQ ID NO: 201, SEQ ID NO: 202, SEQ ID NO: 133, SEQ ID NO: 193, SEQ ID NO: 194, SEQ ID NO: 195, SEQ ID NO: 196, SEQ ID NO: 197, SEQ ID NO: 126, SEQ ID NO: 127, SEQ ID NO: 103, SEQ ID NO: 108, SEQ ID NO: 124, SEQ ID NO: 165, SEQ ID NO: 136, SEQ ID NO: 125, SEQ ID NO: 111, SEQ ID NO: 164, SEQ ID NO: 205, SEQ ID NO: 128, SEQ ID NO: 129, SEQ ID NO: 130, SEQ ID NO: 131, SEQ ID NO: 132, SEQ ID NO: 162, SEQ ID NO: 117, SEQ ID NO: 118, SEQ ID NO: 105, SEQ ID NO: 119, SEQ ID NO: 120, SEQ ID NO: 121, SEQ ID NO: 122, SEQ ID NO: 123, SEQ ID NO: 170, SEQ ID NO: 171, SEQ ID NO: 172, SEQ ID NO: 173, SEQ ID NO: 174, SEQ ID NO: 163, SEQ ID NO: 182, SEQ ID NO: 135, SEQ ID NO: 134, SEQ ID NO: 179, SEQ ID NO: 180, SEQ ID NO: 181, SEQ ID NO: 203, or SEQ ID NO: 213.

[0016] Provided herein is a composition comprising a purified bacterial population, comprising two or more bacteria, wherein the two or more bacteria comprises a long-term engrafter and a transient engrafter.

[0017] In some embodiments, the purified bacterial population further comprises one or more bacteria, which has one or more features selected from the group consisting of: (i) capable of engrafting when administered to a subject, (ii) capable of having anti-inflammatory activity, (iii) not capable of inducing pro-inflammatory activity, (iv) capable of producing a secondary bile acid, (v) capable of producing a tryptophan metabolite, (vi) capable of restoring epithelial integrity as determined by a primary epithelial cell monolayer barrier integrity assay, (vii) capable of being associated with remission of an inflammatory bowel disease, (viii) capable of producing a short-chain fatty acid, (ix) capable of inhibiting a HDAC activity, (x) capable of producing a middle-chain fatty acid, (xi) capable of expressing catalase activity, (xii) capable of having alpha-fucosidase activity, (xiii) capable of inducing Wnt activation, (xiv) capable of producing a B vitamin, (xv) capable of modulating host metabolism of endocannabinoid, (xvi) capable of producing a polyamine and/or modulating host metabolism of polyamines, (xvii) capable of reducing fecal levels of a sphingolipid, (xviii) capable of modulating host production of kynurenine, (xix) capable of reducing fecal calprotectin level, (xx) not capable of activating a toll-like receptor pathway (e.g., TLR4 or TLR5), (xxi) capable of activating a toll-like receptor pathway (e.g., TLR2), and (xxii) any combination thereof.

[0018] In some embodiments, the one or more features are selected from (i) capable of engrafting when administered to a subject; (ii) capable of having anti-inflammatory activity, (iii) not capable of inducing pro-inflammatory activity, (iv) capable of producing a secondary bile acid, (v) capable of producing a tryptophan metabolite, (vi) capable of restoring epithelial integrity as determined by a primary epithelial cell monolayer barrier integrity assay, (vii) capable of being associated with remission of an inflammatory bowel disease, (viii) capable of producing a short-chain fatty acid, (ix) capable of inhibiting a HDAC activity, (x) capable of producing a middle-chain fatty acid, or (xi) any combination thereof.

[0019] In some embodiments, a composition comprising a purified bacterial population disclosed herein comprises two, three, four, five, six, seven or more long-term engrafters. In certain embodiments, the purified bacterial population comprises two, three, four, five, six, seven or more transient engrafters. In some embodiments, the purified bacterial population comprises three or more transient engrafters and/or seven or more long-term engrafters.

[0020] In some embodiments, the purified bacterial population comprises one or more bacteria that are capable of producing a tryptophan metabolite. In some embodiments, the purified bacterial population comprises one or more bacteria that are capable of producing a secondary bile acid. In certain embodiments, the purified bacterial population comprises one or more bacteria that are capable of having anti-inflammatory activity. In other embodiments, the purified bacterial population comprises one or more bacteria that are not capable of inducing pro-inflammatory activity. In some embodiments, the purified bacterial population comprises one or more bacteria that are capable of producing a short-chain fatty acid. In some embodiments, the purified bacterial population comprises one or more bacteria that are capable of producing a medium-chain fatty acid. In some embodiments, the purified bacterial population comprises one or more bacteria that are capable of inhibiting HDAC activity.

[0021] In some embodiments, the tryptophan metabolite disclosed herein comprises indole, 3-methyl indole, indoleacrylate, or any combination thereof. In certain embodiments, the tryptophan metabolite is indole. In certain embodiments, the tryptophan metabolite is 3-methyl indole.

[0022] In some embodiments, one or more bacteria capable of producing a secondary bile acid has 7α-dehydroxylase activity. In some embodiments, the one or more bacteria capable of producing a secondary bile acid has bile salt hydrolase (BSH) activity. In certain embodiments, the first purified bacterial population and/or the second purified bacterial population of a composition disclosed herein does not comprise a bacterium having 7β-hydroxysteroid dehydrogenase (7β-HSDH) activity. In some embodiments, the secondary bile acid comprises deoxycholic acid (DCA), 3α 12-oxo-deoxycholic acid, 3β 12α-deoxycholic acid (3-isodeoxycholic acid), 7α 3-oxo-chenodeoxycholic acid, lithocholic acid (LCA), 3-oxo LCA, or any combination thereof.

[0023] In some embodiments, one or more bacteria capable of having anti-inflammatory activity comprises (i) bacteria capable of producing a short-chain fatty acid, (ii) bacteria capable of inhibiting histone deacetylase (HDAC) activity, (iii) bacteria capable of inhibiting TNF-α-driven IL-8 secretion in epithelial cells in vitro, or (iv) any combination thereof. In some embodiments, one or more bacteria not capable of inducing pro-inflammatory activity comprises (i) bacteria not capable of inducing IL-8 secretion in epithelial cells in vitro and/or (ii) bacteria not capable of activating Toll-like receptor 4 (TLR4) and/or Toll-like receptor 5 (TLR5) in vitro.

[0024] In some embodiments, a short-chain fatty acid disclosed herein comprises formate, acetate, propionate, butyrate, isobutryate, valerate, isovalerate, or any combination thereof. In certain embodiments, the short-chain fatty acid is propionate. In certain embodiments, the short-chain fatty acid is butyrate. In some embodiments, a medium-chain fatty acid comprises hexanoate, octanoate, decanoate, dodecanoate, or any combination thereof. In certain embodiments, the medium-chain fatty acid is hexanoate or pentanoate.

[0025] In some embodiments, a long-term engrafter that can be included in a composition disclosed herein has a 16S rDNA sequence that is at least 97%, at least 97.5%, at least 98%, at least 98.5%, at least 99%, at least 99.5%, or 100% identical to a 16S rDNA sequence of a long-term engrafter provided in Table 5. In certain embodiments, the long-term engrafter has a 16S rDNA sequence that is at least 97%, at least 97.5%, at least 98%, at least 98.5%, at least 99%, at least 99.5%, or 100% identical to a 16S rDNA sequence set forth in SEQ ID NO: 161, SEQ ID NO: 211, SEQ ID NO: 185, SEQ ID NO: 208, SEQ ID NO: 203, SEQ ID NO: 111, SEQ ID NO: 117, SEQ ID NO: 206, SEQ ID NO: 159, SEQ ID NO: 182, SEQ ID NO: 183, SEQ ID NO: 135, SEQ ID NO: 165, SEQ ID NO: 209, SEQ ID NO: 179, SEQ ID NO: 180, SEQ ID NO: 181, or SEQ ID NO: 189.

[0026] In some embodiments, a transient-engrafter disclosed herein has a 16S rDNA sequence that is at least 97%, at least 97.5%, at least 98%, at least 98.5%, at least 99%, at least 99.5%, or 100% identical to a 16S rDNA sequence of a transient engrafter provided in Table 5. In some embodiments, the transient engrafter has a 16S rDNA sequence that is at least 97%, at least 97.5%, at least 98%, at least 98.5%, at least 99%, at least 99.5%, or 100% identical to a 16S rDNA sequence set forth in SEQ ID NO: 119, SEQ ID NO: 120, SEQ ID NO: 121, SEQ ID NO: 122, SEQ ID NO: 123, SEQ ID NO: 103, SEQ ID NO: 190, SEQ ID NO: 191, SEQ ID NO: 118, SEQ ID NO: 163, SEQ ID NO: 133, SEQ ID NO: 192, SEQ ID NO: 134, SEQ ID NO: 137, SEQ ID NO: 128, SEQ ID NO: 129, SEQ ID NO: 130, SEQ ID NO: 131, SEQ ID NO: 132, or SEQ ID NO: 175.

[0027] Provided herein is a composition comprising a purified bacterial population, which comprises one or more bacteria having a 16S rDNA sequence that is at least 97%, at least 97.5%, at least 98%, at least 98.5%, at least 99%, at least 99.5%, or 100% identical to a 16S rDNA sequence set forth in SEQ ID NO: 215, SEQ ID NO: 112, SEQ ID NO: 113, SEQ ID NO: 114, SEQ ID NO: 115, SEQ ID NO: 116, SEQ ID NO: 188, SEQ ID NO: 212, SEQ ID NO: 160, SEQ ID NO: 186, SEQ ID NO: 104, SEQ ID NO: 208, SEQ ID NO: 189, SEQ ID NO: 187, SEQ ID NO: 207, SEQ ID NO: 190, SEQ ID NO: 191, SEQ ID NO: 211, SEQ ID NO: 209, SEQ ID NO: 110, SEQ ID NO: 159, SEQ ID NO: 175, SEQ ID NO: 158, SEQ ID NO: 210, or SEQ ID NO: 106.

[0028] In some embodiments, the purified bacterial population further comprises one or more bacteria having a 16S rDNA sequence that is at least 97%, at least 97.5%, at least 98%, at least 98.5%, at least 99%, at least 99.5%, or 100% identical to a 16S rDNA sequence set forth in SEQ ID NO: 185, SEQ ID NO: 183, SEQ ID NO: 161, SEQ ID NO: 206, SEQ ID NO: 102, SEQ ID NO: 214, SEQ ID NO: 184, SEQ ID NO: 204, SEQ ID NO: 216, SEQ ID NO: 217, SEQ ID NO: 218, SEQ ID NO: 219, SEQ ID NO: 220, SEQ ID NO: 221, SEQ ID NO: 222, SEQ ID NO: 223, SEQ ID NO: 224, SEQ ID NO: 225, SEQ ID NO: 226, SEQ ID NO: 227, SEQ ID NO: SEQ ID NO: 166, SEQ ID NO: 167, SEQ ID NO: 168, SEQ ID NO: 169, SEQ ID NO: 109, SEQ ID NO: 138, SEQ ID NO: 139, SEQ ID NO: 140, SEQ ID NO: 141, SEQ ID NO: 142, SEQ ID NO: 143, SEQ ID NO: 144, SEQ ID NO: 145, SEQ ID NO: 146, SEQ ID NO: 147, SEQ ID NO: 192, SEQ ID NO: 176, SEQ ID NO: 177, SEQ ID NO: 178, SEQ ID NO: 107, SEQ ID NO: 137, SEQ ID NO: 198, SEQ ID NO: 199, SEQ ID NO: 200, SEQ ID NO: 201, SEQ ID NO: 202, SEQ ID NO: 133, SEQ ID NO: 193, SEQ ID NO: 194, SEQ ID NO: 195, SEQ ID NO: 196, SEQ ID NO: 197, SEQ ID NO: 126, SEQ ID NO: 127, SEQ ID NO: 103, SEQ ID NO: 108, SEQ ID NO: 124, SEQ ID NO: 165, SEQ ID NO: 136, SEQ ID NO: 125, SEQ ID NO: 111, SEQ ID NO: 164, SEQ ID NO: 205, SEQ ID NO: 128, SEQ ID NO: 129, SEQ ID NO: 130, SEQ ID NO: 131, SEQ ID NO: 132, SEQ ID NO: 162, SEQ ID NO: 117, SEQ ID NO: 118, SEQ ID NO: 105, SEQ ID NO: 119, SEQ ID NO: 120, SEQ ID NO: 121, SEQ ID NO: 122, SEQ ID NO: 123, SEQ ID NO: 170, SEQ ID NO: 171, SEQ ID NO: 172, SEQ ID NO: 173, SEQ ID NO: 174, SEQ ID NO: 163, SEQ ID NO: 182, SEQ ID NO: 135, SEQ ID NO: 134, SEQ ID NO: 179, SEQ ID NO: 180, SEQ ID NO: 181, SEQ ID NO: 203, or SEQ ID NO: 213.

[0029] Disclosed herein is a composition comprising a purified population of bacteria having 16S rDNA sequences that are at least 97%, at least 97.5%, at least 98%, at least 98.5%, at least 99%, at least 99.5%, or 100% identical to a 16S rDNA sequence selected from the group consisting of: (1) SEQ ID NO: 112, SEQ ID NO: 113, SEQ ID NO: 114, SEQ ID NO: 115, SEQ ID NO: 116, SEQ ID NO: 188, SEQ ID NO: 186, SEQ ID NO: 104, SEQ ID NO: 187; (2) SEQ ID NO: 186; (3) SEQ ID NO: 112, SEQ ID NO: 113, SEQ ID NO: 114, SEQ ID NO: 115, SEQ ID NO: 116, SEQ ID NO: 188, SEQ ID NO: 186, SEQ ID NO: 104, SEQ ID NO: 190, SEQ ID NO: 191, SEQ ID NO: 175; (4) SEQ ID NO: 112, SEQ ID NO: 113, SEQ ID NO: 114, SEQ ID NO: 115, SEQ ID NO: 116, SEQ ID NO: 188, SEQ ID NO: 186, SEQ ID NO: 203, SEQ ID NO: 104; (5) SEQ ID NO: 112, SEQ ID NO: 113, SEQ ID NO: 114, SEQ ID NO: 115, SEQ ID NO: 116, SEQ ID NO: 186, SEQ ID NO: 203, SEQ ID NO: 190, SEQ ID NO: 191, SEQ ID NO: 175; (6) SEQ ID NO: 112, SEQ ID NO: 113, SEQ ID NO: 114, SEQ ID NO: 115, SEQ ID NO: 116, SEQ ID NO: 104; (7) SEQ ID NO: 112, SEQ ID NO: 113, SEQ ID NO: 114, SEQ ID NO: 115, SEQ ID NO: 116, SEQ ID NO: 104, SEQ ID NO: 190, SEQ ID NO: 191, SEQ ID NO: 175; (8) SEQ ID NO: 112, SEQ ID NO: 113, SEQ ID NO: 114, SEQ ID NO: 115, SEQ ID NO: 116, SEQ ID NO: 203, SEQ ID NO: 104; (9) SEQ ID NO: 112, SEQ ID NO: 113, SEQ ID NO: 114, SEQ ID NO: 115, SEQ ID NO: 116, SEQ ID NO: 203, SEQ ID NO: 190, SEQ ID NO: 191, SEQ ID NO: 175; (10) SEQ ID NO: 159, SEQ ID NO: 190, SEQ ID NO: 191, SEQ ID NO: 211; (11) SEQ ID NO: 212, SEQ ID NO: 203, SEQ ID NO: 189, SEQ ID NO: 190, SEQ ID NO: 191, SEQ ID NO: 211, SEQ ID NO: 159, SEQ ID NO: 175, SEQ ID NO: 210; (12) SEQ ID NO: 212, SEQ ID NO: 203, SEQ ID NO: 189, SEQ ID NO: 190, SEQ ID NO: 191, SEQ ID NO: 211, SEQ ID NO: 159, SEQ ID NO: 175; (13) SEQ ID NO: 212, SEQ ID NO: 203, SEQ ID NO: 189, SEQ ID NO: 190, SEQ ID NO: 191, SEQ ID NO: 211, SEQ ID NO: 159; (14) SEQ ID NO: 212, SEQ ID NO: 203, SEQ ID NO: 190, SEQ ID NO: 191, SEQ ID NO: 211, SEQ ID NO: 159; (15) SEQ ID NO: 203, SEQ ID NO: 189, SEQ ID NO: 211, SEQ ID NO: 175; (16) SEQ ID NO: 203, SEQ ID NO: 190, SEQ ID NO: 191, SEQ ID NO: 211, SEQ ID NO: 175; (17) SEQ ID NO: 203, SEQ ID NO: 189, SEQ ID NO: 190, SEQ ID NO: 191, SEQ ID NO: 211, SEQ ID NO: 175; (18) SEQ ID NO: 203, SEQ ID NO: 208, SEQ ID NO: 190, SEQ ID NO: 191, SEQ ID NO: 211, SEQ ID NO: 159, SEQ ID NO: 175; (19) SEQ ID NO: 203, SEQ ID NO: 190, SEQ ID NO: 191, SEQ ID NO: 211, SEQ ID NO: 159, SEQ ID NO: 175; (20) SEQ ID NO: 203, SEQ ID NO: 208, SEQ ID NO: 190, SEQ ID NO: 191, SEQ ID NO: 211, SEQ ID NO: 159, SEQ ID NO: 175; (21) SEQ ID NO: 203, SEQ ID NO: 208, SEQ ID NO: 189, SEQ ID NO: 190, SEQ ID NO: 191, SEQ ID NO: 211, SEQ ID NO: 159, SEQ ID NO: 175; (22) SEQ ID NO: 203, SEQ ID NO: 208, SEQ ID NO: 190, SEQ ID NO: 191, SEQ ID NO: 21, SEQ ID NO: 209, SEQ ID NO: 159; (23) SEQ ID NO: 203, SEQ ID NO: 190, SEQ ID NO: 191, SEQ ID NO: 211, SEQ ID NO: 209, SEQ ID NO: 159; (24) SEQ ID NO: 215, SEQ ID NO: 160, SEQ ID NO: 158, SEQ ID NO: 106; and (25) any combination thereof.

[0030] In some embodiments, the purified bacterial population further comprises 16S rDNA sequences that are at least 97%, at least 97.5%, at least 98%, at least 98.5%, at least 99%, at least 99.5%, or 100% identical to a 16S rDNA sequence selected from the group consisting of: (1) SEQ ID NO: 184, SEQ ID NO: 204, SEQ ID NO: 216, SEQ ID NO: 217, SEQ ID NO: 218, SEQ ID NO: 219, SEQ ID NO: 220, SEQ ID NO: 221, SEQ ID NO: 222, SEQ ID NO: 223, SEQ ID NO: 224, SEQ ID NO: 225, SEQ ID NO: 226, SEQ ID NO: 227, SEQ ID NO: 198, SEQ ID NO: 199, SEQ ID NO: 200, SEQ ID NO: 201, SEQ ID NO: 202, SEQ ID NO: 126, SEQ ID NO: 127, SEQ ID NO: 103, SEQ ID NO: 128, SEQ ID NO: 129, SEQ ID NO: 130, SEQ ID NO: 131, SEQ ID NO: 132, SEQ ID NO: 162, SEQ ID NO: 119, SEQ ID NO: 120, SEQ ID NO: 121, SEQ ID NO: 122, SEQ ID NO: 123; (2) SEQ ID NO: 204, SEQ ID NO: 103; (3) SEQ ID NO: 204, SEQ ID NO: 103, SEQ ID NO: 205; (4) SEQ ID NO: 185, SEQ ID NO: 204, SEQ ID NO: 176, SEQ ID NO: 177, SEQ ID NO: 178, SEQ ID NO: 117; (5) SEQ ID NO: 184, SEQ ID NO: 204, SEQ ID NO: 198, SEQ ID NO: 199, SEQ ID NO: 200, SEQ ID NO: 201, SEQ ID NO: 202, SEQ ID NO: 103, SEQ ID NO: 162, SEQ ID NO: 134; (6) SEQ ID NO: 184, SEQ ID NO: 204, SEQ ID NO: 198, SEQ ID NO: 199, SEQ ID NO: 200, SEQ ID NO: 201, SEQ ID NO: 202, SEQ ID NO: 103, SEQ ID NO: 165, SEQ ID NO: 162, SEQ ID NO: 182; (7) SEQ ID NO: 184, SEQ ID NO: 204, SEQ ID NO: 103, SEQ ID NO: 165, SEQ ID NO: 162, SEQ ID NO: 182, SEQ ID NO: 134; (8) SEQ ID NO: 184, SEQ ID NO: 204, SEQ ID NO: 166, SEQ ID NO: 167, SEQ ID NO: 168, SEQ ID NO: 169, SEQ ID NO: 176, SEQ ID NO: 177, SEQ ID NO: 178, SEQ ID NO: 137, SEQ ID NO: 103, SEQ ID NO: 128, SEQ ID NO: 129, SEQ ID NO: 130, SEQ ID NO: 131, SEQ ID NO: 132, SEQ ID NO: 162, SEQ ID NO: 118, SEQ ID NO: 119, SEQ ID NO: 120, SEQ ID NO: 121, SEQ ID NO: 122, SEQ ID NO: 123; (9) SEQ ID NO: 184, SEQ ID NO: 204, SEQ ID NO: SEQ ID NO: 166, SEQ ID NO: 167, SEQ ID NO: 168, SEQ ID NO: 169, SEQ ID NO: 176, SEQ ID NO: 177, SEQ ID NO: 178, SEQ ID NO: 137, SEQ ID NO: 103, SEQ ID NO: 162, SEQ ID NO: 118, SEQ ID NO: 134; (10) SEQ ID NO: 184, SEQ ID NO: 204, SEQ ID NO: SEQ ID NO: 166, SEQ ID NO: 167, SEQ ID NO: 168, SEQ ID NO: 169, SEQ ID NO: 176, SEQ ID NO: 177, SEQ ID NO: 178, SEQ ID NO: 137, SEQ ID NO: 103, SEQ ID NO: 162, SEQ ID NO: 118, SEQ ID NO: 182; (11) SEQ ID NO: 184, SEQ ID NO: 204, SEQ ID NO: SEQ ID NO: 166, SEQ ID NO: 167, SEQ ID NO: 168, SEQ ID NO: 169, SEQ ID NO: 176, SEQ ID NO: 177, SEQ ID NO: 178, SEQ ID NO: 137, SEQ ID NO: 103, SEQ ID NO: 162, SEQ ID NO: 118, SEQ ID NO: 182, SEQ ID NO: 134; (12) SEQ ID NO: 111, SEQ ID NO: 135, SEQ ID NO: 134; (13) SEQ ID NO: 166, SEQ ID NO: 167, SEQ ID NO: 168, SEQ ID NO: 169, SEQ ID NO: 176, SEQ ID NO: 177, SEQ ID NO: 178, SEQ ID NO: 137, SEQ ID NO: 111, SEQ ID NO: 135, SEQ ID NO: 134; (14) SEQ ID NO: 183, SEQ ID NO: 204, SEQ ID NO: 166, SEQ ID NO: 167, SEQ ID NO: 168, SEQ ID NO: 169, SEQ ID NO: 176, SEQ ID NO: 177, SEQ ID NO: 178, SEQ ID NO: 137, SEQ ID NO: 133, SEQ ID NO: 103, SEQ ID NO: 111, SEQ ID NO: 118, SEQ ID NO: 163, SEQ ID NO: 135, SEQ ID NO: 134; (15) SEQ ID NO: 166, SEQ ID NO: 167, SEQ ID NO: 168, SEQ ID NO: 169, SEQ ID NO: 176, SEQ ID NO: 177, SEQ ID NO: 178, SEQ ID NO: 137, SEQ ID NO: 193, SEQ ID NO: 194, SEQ ID NO: 195, SEQ ID NO: 196, SEQ ID NO: 197, SEQ ID NO: 111, SEQ ID NO: 118, SEQ ID NO: 170, SEQ ID NO: 171, SEQ ID NO: 172, SEQ ID NO: 173, SEQ ID NO: 174, SEQ ID NO: 135, SEQ ID NO: 134; (16) SEQ ID NO: 133, SEQ ID NO: 111, SEQ ID NO: 128, SEQ ID NO: 129, SEQ ID NO: 130, SEQ ID NO: 131, SEQ ID NO: 132, SEQ ID NO: 119, SEQ ID NO: 120, SEQ ID NO: 121, SEQ ID NO: 122, SEQ ID NO: 123, SEQ ID NO: 182, SEQ ID NO: 135, SEQ ID NO: 134; (17) SEQ ID NO: 111, SEQ ID NO: 182, SEQ ID NO: 135, SEQ ID NO: 134; (18) SEQ ID NO: 166, SEQ ID NO: 167, SEQ ID NO: 168, SEQ ID NO: 169, SEQ ID NO: 176, SEQ ID NO: 177, SEQ ID NO: 178, SEQ ID NO: 137, SEQ ID NO: 111, SEQ ID NO: 118, SEQ ID NO: 182, SEQ ID NO: 135, SEQ ID NO: 134; (19) SEQ ID NO: 184, SEQ ID NO: 166, SEQ ID NO: 167, SEQ ID NO: 168, SEQ ID NO: 169, SEQ ID NO: 176, SEQ ID NO: 177, SEQ ID NO: 178, SEQ ID NO: 137, SEQ ID NO: 111, SEQ ID NO: 118, SEQ ID NO: 135, SEQ ID NO: 134; (20) SEQ ID NO: 183, SEQ ID NO: 166, SEQ ID NO: 167, SEQ ID NO: 168, SEQ ID NO: 169, SEQ ID NO: 176, SEQ ID NO: 177, SEQ ID NO: 178, SEQ ID NO: 137, SEQ ID NO: 136, SEQ ID NO: 111, SEQ ID NO: 118, SEQ ID NO: 119, SEQ ID NO: 120, SEQ ID NO: 121, SEQ ID NO: 122, SEQ ID NO: 123, SEQ ID NO: 135, SEQ ID NO: 134; (21) SEQ ID NO: 185, SEQ ID NO: 183, SEQ ID NO: 161, SEQ ID NO: 206, SEQ ID NO 137: SEQ ID NO: 133, SEQ ID NO: 103, SEQ ID NO: 111, SEQ ID NO: 117, SEQ ID NO: 119, SEQ ID NO: 120, SEQ ID NO: 121, SEQ ID NO: 122, SEQ ID NO: 123, SEQ ID NO: 163; (22) SEQ ID NO: 183, SEQ ID NO: 161, SEQ ID NO: 206, SEQ ID NO: 137, SEQ ID NO: 103, SEQ ID NO: 111, SEQ ID NO: 117, SEQ ID NO: 118, SEQ ID NO: 119, SEQ ID NO: 120, SEQ ID NO: 121, SEQ ID NO: 122, SEQ ID NO: 123, SEQ ID NO: 163, SEQ ID NO: 134; (23) SEQ ID NO: 185, SEQ ID NO: 183, SEQ ID NO: 137, SEQ ID NO: 103, SEQ ID NO: 111, SEQ ID NO: 117, SEQ ID NO: 118, SEQ ID NO: 119, SEQ ID NO: 120, SEQ ID NO: 121, SEQ ID NO: 122, SEQ ID NO: 123, SEQ ID NO: 163, SEQ ID NO: 134; (24) SEQ ID NO: 206, SEQ ID NO: 137, SEQ ID NO: 103, SEQ ID NO: 111, SEQ ID NO: 117, SEQ ID NO: 118, SEQ ID NO: 119, SEQ ID NO: 120, SEQ ID NO: 121, SEQ ID NO: 122, SEQ ID NO: 123, SEQ ID NO: 182, SEQ ID NO: 13; (25) SEQ ID NO: 185, SEQ ID NO: 183, SEQ ID NO: 206, SEQ ID NO: 192, SEQ ID NO: 137, SEQ ID NO: 103, SEQ ID NO: 165, SEQ ID NO: 111, SEQ ID NO: 117, SEQ ID NO: 118, SEQ ID NO: 163; (26) SEQ ID NO: 185, SEQ ID NO: 183, SEQ ID NO: 206, SEQ ID NO: 137, SEQ ID NO: 103, SEQ ID NO: 111, SEQ ID NO: 117, SEQ ID NO: 118, SEQ ID NO: 119, SEQ ID NO: 120, SEQ ID NO: 121, SEQ ID NO: 122, SEQ ID NO: 123, SEQ ID NO: 163, SEQ ID NO: 182; (27) SEQ ID NO: 206, SEQ ID NO: 137, SEQ ID NO: 103, SEQ ID NO: 165, SEQ ID NO: 111, SEQ ID NO: 117, SEQ ID NO: 118, SEQ ID NO: 119, SEQ ID NO: 120, SEQ ID NO: 121, SEQ ID NO: 122, SEQ ID NO: 123, SEQ ID NO: 163, SEQ ID NO: 182; (28) SEQ ID NO: 185, SEQ ID NO: 183, SEQ ID NO: 206, SEQ ID NO: 137, SEQ ID NO: 103, SEQ ID NO: 165, SEQ ID NO: 111, SEQ ID NO: 117, SEQ ID NO: 119, SEQ ID NO: 120, SEQ ID NO: 121, SEQ ID NO: 122, SEQ ID NO: 123, SEQ ID NO: 163, SEQ ID NO: 182, SEQ ID NO: 135; (29) SEQ ID NO: 185, SEQ ID NO: 161, SEQ ID NO: 206, SEQ ID NO: 137, SEQ ID NO: 133, SEQ ID NO: 103, SEQ ID NO: 111, SEQ ID NO: 117, SEQ ID NO: 118, SEQ ID NO: 119, SEQ ID NO: 120, SEQ ID NO: 121, SEQ ID NO: 122, SEQ ID NO: 123, SEQ ID NO: 163, SEQ ID NO: 182, SEQ ID NO: 135; (30) SEQ ID NO: 185, SEQ ID NO: 183, SEQ ID NO: 206, SEQ ID NO: 192, SEQ ID NO: 137, SEQ ID NO: 133, SEQ ID NO: 103, SEQ ID NO: 165, SEQ ID NO: 111, SEQ ID NO: 117, SEQ ID NO: 118, SEQ ID NO: 119, SEQ ID NO: 120, SEQ ID NO: 121, SEQ ID NO: 122, SEQ ID NO: 123, SEQ ID NO: 163; (31) SEQ ID NO: 185, SEQ ID NO: 183, SEQ ID NO: 206, SEQ ID NO: 137, SEQ ID NO: 103, SEQ ID NO: 111, SEQ ID NO: 117, SEQ ID NO: 118, SEQ ID NO: 119, SEQ ID NO: 120, SEQ ID NO: 121, SEQ ID NO: 122, SEQ ID NO: 123, SEQ ID NO: 163, SEQ ID NO: 182, SEQ ID NO: 135; (32) SEQ ID NO: 185, SEQ ID NO: 183, SEQ ID NO: 161, SEQ ID NO: 206, SEQ ID NO: 192, SEQ ID NO: 137, SEQ ID NO: 133, SEQ ID NO: 103, SEQ ID NO: 165, SEQ ID NO: 111, SEQ ID NO: 117, SEQ ID NO: 118, SEQ ID NO: 119, SEQ ID NO: 120, SEQ ID NO: 121, SEQ ID NO: 122, SEQ ID NO: 123, SEQ ID NO: 163, SEQ ID NO: 182, SEQ ID NO: 135, SEQ ID NO: 134; (33) SEQ ID NO: 185, SEQ ID NO: 183, SEQ ID NO: 161, SEQ ID NO: 206, SEQ ID NO: 192, SEQ ID NO: 137, SEQ ID NO: 103, SEQ ID NO: 165, SEQ ID NO: 111, SEQ ID NO: 128, SEQ ID NO: 129, SEQ ID NO: 130, SEQ ID NO: 131, SEQ ID NO: 132, SEQ ID NO: 117, SEQ ID NO: 118, SEQ ID NO: 119, SEQ ID NO: 120, SEQ ID NO: 121, SEQ ID NO: 122, SEQ ID NO: 123, SEQ ID NO: 163, SEQ ID NO: 182, SEQ ID NO: 134, SEQ ID NO: 179, SEQ ID NO: 180, SEQ ID NO: 181; (34) SEQ ID NO: 185, SEQ ID NO: 161, SEQ ID NO: 206, SEQ ID NO: 137, SEQ ID NO: 103, SEQ ID NO: 111, SEQ ID NO: 128, SEQ ID NO: 129, SEQ ID NO: 130, SEQ ID NO: 131, SEQ ID NO: 132, SEQ ID NO: 117, SEQ ID NO: 118, SEQ ID NO: 119, SEQ ID NO: 120, SEQ ID NO: 121, SEQ ID NO: 122, SEQ ID NO: 123, SEQ ID NO: 163, SEQ ID NO: 182, SEQ ID NO: 179, SEQ ID NO: 180, SEQ ID NO: 181; (35) SEQ ID NO: 102, SEQ ID NO: 216, SEQ ID NO: 217, SEQ ID NO: 218, SEQ ID NO: 219, SEQ ID NO: 220, SEQ ID NO: 221, SEQ ID NO: 222, SEQ ID NO: 223, SEQ ID NO: 224, SEQ ID NO: 225, SEQ ID NO: 226, SEQ ID NO: 227, SEQ ID NO: 166, SEQ ID NO: 167, SEQ ID NO: 168, SEQ ID NO: 169, SEQ ID NO: 109, SEQ ID NO: 107, SEQ ID NO: 103, SEQ ID NO: 108, SEQ ID NO: 117, SEQ ID NO: 105, SEQ ID NO: 179, SEQ ID NO: 180, SEQ ID NO: 181; and (36) any combination thereof.

[0031] In some embodiments, a composition disclosed herein further comprises one or more enteric polymers.

[0032] Present disclosure also provides pharmaceutical formulation comprising any of the bacterial compositions disclosed herein, and a pharmaceutically acceptable excipient. In some embodiments, the excipient is glycerol. In certain embodiments, the composition is lyophilized. In further embodiments, the composition is formulated for oral delivery.

[0033] Provided herein is a method of treating an inflammatory disease in a subject in need thereof, comprising administering to the subject an effective amount of a composition disclosed herein. In certain embodiments, administering the effective amount of the composition ameliorates one or more signs or symptoms of the inflammatory disease or maintains a remission of the inflammatory disease. In some embodiments, the inflammatory disease comprises an inflammatory bowel disease. In certain embodiments, the inflammatory bowel disease comprises Crohn's disease, autoimmune-mediated gastrointestinal diseases, gastrointestinal inflammation, or colitis, such as ulcerative colitis, colitis ulcerosa, microscopic colitis, collagenous colitis, colitis polyposa, necrotizing enterocolitis, transmural colitis, or any combination thereof.

[0034] Also provided herein a use of a compositions disclosed herein (e.g., designed bacterial composition) in the manufacture of a medicament for treating an inflammatory disease in a subject in need thereof. Present disclosure also provides a composition disclosed herein for use in a method of treating an inflammatory disease, comprising administering the composition to the subject.

[0035] Provided herein is a method of modulating the level of a biological molecule in a subject in need thereof, comprising administering to the subject an effective amount of a composition disclosed herein. In certain embodiments, the biological molecule comprises a fecal calprotectin, a secondary bile acid, a tryptophan metabolite, a short-chain fatty acid, a medium-chain fatty acid, a sphingolipid, a kynurenine, or any combination thereof.

[0036] In some embodiments, the level of fecal calprotectin is reduced by at least about 10%, at least about 20%, at least about 30%, at least about 40%, at least about 50% at least about 60%, at least about 70%, at least about 80%, or at least about 90% in the subject compared to a corresponding level in a reference.

[0037] In certain embodiments, the level of a secondary bile acid is increased by at least about 10%, at least about 20%, at least about 30%, at least about 40%, at least about 50%, at least about 60%, at least about 70%, at least about 80%, or at least about 90% in the subject compared to a corresponding level in a reference. In some embodiments, the secondary bile acid comprises deoxycholic acid (DCA), 3α 12-oxo-deoxycholic acid, 3β 12α-deoxycholic acid (3-isodeoxycholic acid), 7α 3-oxo-chenodeoxycholic acid, lithocholic acid (LCA), 3-oxo LCA, or any combination thereof.

[0038] In some embodiments, the level of a tryptophan metabolite is increased by at least about 10%, at least about 20%, at least about 30%, at least about 40%, at least about 50%, at least about 60%, at least about 70%, at least about 80%, or at least about 90% in the subject compared to a corresponding level in a reference. In some embodiments, the tryptophan metabolite is selected from the group consisting of indole, 3-methylindole, and combinations thereof.

[0039] In some embodiments, the level of a short-chain fatty acid is increased by at least about 10%, at least about 20%, at least about 30%, at least about 40%, at least about 50%, at least about 60%, at least about 70%, at least about 80%, or at least about 90% in the subject compared to a corresponding level in a reference. In certain embodiments, the short-chain fatty acid comprises formate, acetate, propionate, butyrate, isobutryate, valerate, isovalerate, or any combination thereof.

[0040] In some embodiments, the reference is a predetermined level or a level in the subject prior to the administration. In some embodiments, the modulation of the biological molecule is associated with remission of an inflammatory disease.

[0041] Also provided herein is a method of treating a cancer in a subject in need thereof, comprising administering to the subject an effective amount of a composition of the present disclosure. Present disclosure further provides the use of any of the compositions disclosed herein in the manufacture of a medicament for treating a cancer in a subject in need thereof. Also disclosed is a composition disclosed herein for use in a method of treating a cancer, comprising administering the composition to the subject.

[0042] Provided herein is a method for inhibiting a growth of a tumor or reducing the size of a tumor in a subject in need thereof, comprising administering to the subject an effective amount of a composition disclosed herein. Also provided is a use of a composition disclosed herein 57 in the manufacture of a medicament for inhibiting a growth of a tumor or reducing the size of a tumor in a subject in need thereof. Also disclosed herein is a composition of the present disclosure for use in a method of treating a cancer, comprising administering the composition to the subject.

[0043] Provided herein is a method of enhancing an immune response in a subject in need thereof, comprising administering to the subject an effective amount of a composition disclosed herein. Also provided herein is a use of a composition of the present disclosure in the manufacture of a medicament for enhancing an immune response in a subject in need thereof. Also disclosed herein is a composition of the present disclosure for use in a method of enhancing an immune response in a subject in need thereof.

[0044] In some embodiments, the subject has a cancer.

[0045] In some embodiments, the methods, the use, or the composition for use further comprises administering an additional therapeutic agent to the subject. In certain embodiments, the additional therapeutic agent comprises an immune checkpoint inhibitor. In some embodiments, the immune checkpoint inhibitor comprises an anti-PD-1 antibody, an anti-PD-L1 antibody, or an anti-CTLA-4 antibody.

[0046] In some embodiments, the cancer comprises a bladder cancer, breast cancer, uterine/cervical cancer, ovarian cancer, prostate cancer, testicular cancer, esophageal cancer, gastrointestinal cancer, pancreatic cancer, colorectal cancer, colon cancer, kidney cancer, head and neck cancer, lung cancer, stomach cancer, germ cell cancer, bone cancer, liver cancer, thyroid cancer, skin cancer, neoplasm of the central nervous system, lymphoma, leukemia, myeloma, sarcoma, virus-related cancer, or any combinations thereof.

[0047] In some embodiments, administering a composition disclosed herein to a subject results in increased number of tumor infiltrating lymphocytes in a tumor of the subject. In some embodiments, the number of tumor infiltrating lymphocytes in the tumor is increased by at least about 5%, at least about 10%, at least about 20%, at least about 30%, at least about 40%, at least about 50%, at least about 60%, at least about 70%, at least about 80%, or at least about 90% or more compared to a reference. In some embodiments, the reference comprises the number of tumor infiltrating lymphocytes in a tumor of a subject that did not receive the composition.

### EMBODIMENTS

[0048] Embodiment 1. A composition comprising a purified population of bacteria, wherein the purified population of bacteria comprises one or more bacteria from the family Ruminococcaceae, Lachnospiraceae, Sutterellaceae, Clostridiaceae, Erysipelotrichaceae, Bacteroidaceae, Akkermansiaceae, or Desulfovibrionaceae.

[0049] Embodiment 2. The composition of Embodiment 1, wherein the purified population of bacteria comprises bacteria from at least two, three, four, five, six, seven, or all of the families.

[0050] Embodiment 3. A composition comprising a purified population of bacteria, wherein the purified population of bacteria comprises one or more bacteria selected from the group consisting of Gemmiger formicilis, Roseburia hominis, Clostridium bolteae, Parasutterella excrementihominis, Holdemania filiformis, Holdemania massiliensis, Bacteroides ovatus, Akkemansia muciniphila, Clostridium leptum, Bilophila wadsworthia, Dielma fastidiosa, Clostridium symbiosum, Eubacterium siraeum, Agathobaculum desmolans, Agathobaculum butyriciproducens, and Bacteroides vulgatus.

[0051] Embodiment 4. The composition of Embodiment 3, wherein the one or more bacteria is Gemmiger formicilis, Roseburia hominis, Clostridium bolteae, Holdemania filiformis, Holdemania massiliensis, Clostridium leptum, Dielma fastidiosa, Clostridium symbiosum, Eubacterium siraeum, or combinations thereof.

[0052] Embodiment 5. A composition comprising a purified population of bacteria, wherein the purified population of bacteria comprises one or more bacteria selected from the group consisting of Anaerotruncus colihominis, Blautia producta, Clostridium bolteae, Clostridium disporicum, Clostridium ghonii, Clostridium glycolicum, Clostridium innocuum, Clostridium lactatifermentans, Clostridium viride, Eubacterium sp. WAL 14571, Lachnospiraceae bacterium 3 1 57FA, Lachnospiraceae bacterium oral taxon F15, Lactonifactor longoviformis, and Ruminococcus lactaris.

[0053] Embodiment 6. A composition comprising a purified population of bacteria, wherein the purified population of bacteria comprises one or more bacteria having a 16S rDNA sequence that is at least 85%, at least 90%, at least 95%, at least 96%, at least 97%, at least 98%, at least 99%, or 100% identical to a 16S rDNA sequence set forth in SEQ ID NOs: 1-14, 16-30, 32-36, 39, 41, 44, 45, 47-51, 59-62, 64-68, and 72-76.

[0054] Embodiment 7. The composition of any one of Embodiments 1 to 6, wherein the purified population of bacteria comprises at least two, three, four, five, six, seven, eight, nine, or more bacteria.

[0055] Embodiment 8. The composition of any one of Embodiments 1 to 7, wherein the one or more bacteria are associated with remission of an inflammatory bowel disease.

[0056] Embodiment 9. The composition of any one of Embodiments 1 to 8, wherein the one or more bacteria can modulate the level of a biological molecule, wherein the biological molecule comprises a fecal calprotectin, a secondary bile acid, a tryptophan metabolite, a short-chain fatty acid, a medium-chain fatty acid, a sphingolipid, a kynurenine, or combinations thereof.

[0057] Embodiment 10. The composition of Embodiment 9, wherein the tryptophan metabolite comprises indole, 3-methylindole, kynurenine, indoleacrylate, or combinations thereof.

[0058] Embodiment 11. The composition of Embodiment 9 or 10, wherein the one or more bacteria can modulate the level of the biological molecule in vivo.

[0059] Embodiment 12. The composition of any one of Embodiments 9 to 11, wherein the one or more bacteria can modulate the level of the biological molecule in a subject diagnosed with ulcerative colitis or in an animal model of ulcerative colitis.

[0060] Embodiment 13. The composition of Embodiment 9, wherein the one or more bacteria can modulate the level of the biological molecule in vitro.

[0061] Embodiment 14. The composition of Embodiment 9, wherein the one or more bacteria can modulate the level of the biological molecule in a culture or a synthetic gastrointestinal system.

[0062] Embodiment 15. The composition of Embodiment 9, wherein the level of a fecal calprotectin is reduced by at least 10%, at least 20%, at least 30%, at least 40%, at least 50%, at least 60%, at least 70%, at least 80%, or at least 90% compared to a corresponding level in a reference.

[0063] Embodiment 16. The composition of Embodiment 9, wherein the level of a secondary bile acid is increased by at least 10%, at least 20%, at least 30%, at least 40%, at least 50%, at least 60%, at least 70%, at least 80%, or at least 90% compared to a corresponding level in a reference.

[0064] Embodiment 17. The composition of Embodiment 16, wherein the secondary bile acid is selected from the group consisting of deoxycholic acid (DCA), 3α 12-oxo-deoxycholic acid, 3p 12α-deoxycholic acid (3-isodeoxycholic acid), 7α 3-oxo-chenodeoxycholic acid, lithocholic acid (LCA), 3-oxo LCA, and combinations thereof.

[0065] Embodiment 18. The composition of Embodiment 9, wherein the level of a tryptophan metabolite is increased by at least 10%, at least 20%, at least 30%, at least 40%, at least 50%, at least 60%, at least 70%, at least 80%, or at least 90% compared to a corresponding level in a reference.

[0066] Embodiment 19. The composition of any one of Embodiments 1 to 18, wherein the one or more bacteria augments the number of spore-forming bacteria in a microbiome of a subject.

[0067] Embodiment 20. The composition of any one of Embodiments 1 to 19, wherein the one or more bacteria augments the number of non-spore-forming bacteria in a microbiome of a subject.

[0068] Embodiment 21. The composition of any one of Embodiments 15, 16, and 18, wherein the reference is a predetermined level or a level in a subject prior to a treatment with the composition.

[0069] Embodiment 22. The composition of any one of Embodiments 1 to 21, wherein the one or more bacteria are spore-forming bacteria.

[0070] Embodiment 23. The composition of any one of Embodiments 1 to 22, wherein the one or more bacteria are capable of being engrafted into a subject's microbiome when administered to the subject.

[0071] Embodiment 24. A composition comprising a purified population of bacteria, wherein the purified population of bacteria does not include one or more bacteria selected from Eubacterium contortum, Clostridium aldenense, Flavonifractor plautii, Ruminococcus gnavus, Clostridium hathewayi, Erysipelatoclostridum ramosum, Clostridium SC174, Blautia SC109, Ruminococcus SC103, Bifidobacterium dentium, Dialister invisus, Prevotella copri, Veillonella atypica, Veillonella dispar, Veillonella parvula, or Veillonella ratti.

[0072] Embodiment 25. A composition comprising a purified population of bacteria, wherein the purified population of bacteria does not include one or more bacteria having a 16S rDNA sequence that is at least 85%, at least 90%, at least 95%, at least 96%, at least 97%, at least 98%, at least 99%, or 100% identical to a 16S rDNA sequence set forth in SEQ ID NOs: 15, 31, 37, 38, 40, 42, 43, 46, 52-58, 63, 69-71, and 83-101.

[0073] Embodiment 26. The composition of Embodiment 24 or 25, wherein the purified population of bacteria does not include at least two, three, four, five, six, seven, eight, nine, ten, eleven, or all of the excluded bacteria.

[0074] Embodiment 27. The composition of any one of Embodiments 24 to 26, wherein the one or more excluded bacteria is not associated with remission of an inflammatory bowel disease.

[0075] Embodiment 28. A composition comprising one or more bacteria having at least 2, 3, 4, 5, 6, or 7 of the following features: (i) the ability to produce hexanoate, (ii) the ability to produce valerate, (iii) the ability to produce indole, (iv) the ability to produce 3-methylindole, (v) the ability to induce regulatory T cells (Tregs) (e.g., CD4+/FoxP3+ cells), (vi) the ability to inhibit HDAC activity, or (vii) the ability to show efficacy (e.g., have a significant lower pathology score relative to a disease control) in a T-cell model in aggregate.

[0076] Embodiment 29. The composition of Embodiment 28, wherein the one or more bacteria have no 7-alpha dehydrogenase activity.

[0077] Embodiment 30. The composition of Embodiment 28 or 29, wherein the features are associated with an improvement of an inflammatory bowel disease.

[0078] Embodiment 31. The composition of any one of Embodiments 8, 27, and 30 wherein the inflammatory bowel disease is ulcerative colitis.

[0079] Embodiment 32. A pharmaceutical formulation comprising the composition of any one of Embodiments 1 to 31 and a pharmaceutically acceptable excipient.

[0080] Embodiment 33. The pharmaceutical formulation of Embodiment 32, wherein the excipient is glycerol.

[0081] Embodiment 34. The pharmaceutical formulation of Embodiment 32 or 33, wherein the composition is lyophilized.

[0082] Embodiment 35. The pharmaceutical formulation of any one of Embodiments 32 to 34, wherein the composition is formulated for oral delivery.

[0083] Embodiment 36. A method of treating an inflammatory bowel disease in a subject in need thereof, comprising administering to the subject an effective amount of a composition of any one of Embodiments 1 to 31 or a pharmaceutical formulation of any one of Embodiments 32 to 35.

[0084] Embodiment 37. The method of Embodiment 36, wherein administering the effective amount of the composition ameliorates one or more signs or symptoms of the inflammatory bowel disease or maintains a remission of the inflammatory bowel disease.

[0085] Embodiment 38. The method of Embodiment 36 or 37, wherein the inflammatory bowel disease comprises Crohn's disease, autoimmune-mediated gastrointestinal diseases, gastrointestinal inflammation, or colitis, such as ulcerative colitis, colitis ulcerosa, microscopic colitis, collagenous colitis, colitis polyposa, necrotizing enterocolitis, or transmural colitis.

[0086] Embodiment 39. A method of modulating the level of a biological molecule in a subject in need thereof, comprising administering to the subject an effective amount of a composition of any one of Embodiments 1 to 31 or a pharmaceutical formulation of any one of Embodiments 32 to 35.

[0087] Embodiment 40. The method of Embodiment 39, wherein the biological molecule comprises a fecal calprotectin, a secondary bile acid, a tryptophan metabolite, a short-chain fatty acid, a medium-chain fatty acid, a sphingolipid, a kynurenine, or combinations thereof.

[0088] Embodiment 41. The method of Embodiment 40, wherein the level of a fecal calprotectin is reduced by at least 10%, at least 20%, at least 30%, at least 40%, at least 50%, at least 60%, at least 70%, at least 80%, or at least 90% in the subject compared to a corresponding level in a reference.

[0089] Embodiment 42. The method of Embodiment 40, wherein the level of a secondary bile acid is increased by at least 10%, at least 20%, at least 30%, at least 40%, at least 50%, at least 60%, at least 70%, at least 80%, or at least 90% in the subject compared to a corresponding level in a reference.

[0090] Embodiment 43. The method of Embodiment 42, wherein the secondary bile acid is selected from the group consisting of deoxycholic acid (DCA), 3α 12-oxo-deoxycholic acid, 3l 12α-deoxycholic acid (3-isodeoxycholic acid), 7α 3-oxo-chenodeoxycholic acid, lithocholic acid (LCA), 3-oxo LCA, and combinations thereof.

[0091] Embodiment 44. The method of Embodiment 40, wherein the level of a tryptophan metabolite is increased by at least 10%, at least 20% at least 30% at least 40%, at least 50%, at least 60%, at least 70%, at least 80%, or at least 90% in the subject compared to a corresponding level in a reference.

[0092] Embodiment 45. The method of Embodiment 44, wherein the tryptophan metabolite is selected from the group consisting of indole, 3-methylindole, and combinations thereof.

[0093] Embodiment 46. The method of any one of Embodiments 41, 42, or 44, wherein the reference is a predetermined level or a level in the subject prior to the administration.

[0094] Embodiment 47. The method of any one of Embodiments 39 to 46, wherein the modulation of the biological molecule is associated with remission of an inflammatory bowel disease.

[0095] Embodiment 48. A method of identifying if a subject is a suitable donor for a fecal bacteriotherapy, comprising: a) obtaining a microbiome sample from the subject; b) determining the prevalence of one or more bacteria in the microbiome sample; and c) determining that the subject is a suitable donor if the microbiome comprises one or more bacteria selected from the group consisting of Gemmiger formicilis, Roseburia hominis, Clostridium bolteae, Parasutterella excrementihominis, Holdemania filiformis, Holdemania massiliensis, Bacteroides ovatus, Akkemansia muciniphila, Clostridium leptum, Bilophila wadsworthia, Dielma fastidiosa, Clostridium symbiosum, Eubacterium siraeum, Agathobaculum desmolans, Agathobaculum butyriciproducens, and Bacteroides vulgatus.

[0096] Embodiment 49. A method of identifying if a subject is a suitable donor for a fecal bacteriotherapy, comprising: a) obtaining a microbiome sample from the subject; b) determining the prevalence of one or more bacteria in the microbiome sample; and c) determining that the subject is a suitable donor if the microbiome comprises one or more bacteria having a 16S rDNA sequence that is at least 85%, at least 90%, at least 95%, at least 96%, at least 97%, at least 98%, at least 99%, or 100% identical to a 16S rDNA sequence set forth in SEQ ID NOs: 1-14, 16-30, 32-36, 39, 41, 44, 45, 47-51, 59-62, 64-68, and 72-76.

### BRIEF DESCRIPTION OF THE DRAWINGS/FIGURES

[0097] FIG. 1 shows a comparison of the clinical remission (left graph) and endoscopic improvement (right graph) at 8 weeks post initial treatment in ulcerative colitis patients who received one of the following treatment regimens: (A) placebo pre-treatment/placebo once daily; (B) placebo pre-treatment/purified spore population derived from the feces of healthy human donors (healthy human spore product; HHSP) once weekly; (C) vancomycin pre-treatment/HHSP once weekly; or (D) vancomycin pre-treatment/HHSP once daily. Pretreatment period was 6 days and treatment period was 8 weeks. The percentages of patients from each of the groups who went into clinical remission (Total Modified Mayo (TMM) score of <2 plus endoscopic subscore of <1) or showed endoscopic improvement (decrease in endoscopic score of >1) are shown above the respective bars.

[0098] FIGS. 2A to 2C show a comparison of the number of “high confidence engrafting bacteria” species associated with HHSP detected in the fecal samples of ulcerative colitis patients from each of the 4 Arms (A, B, C, and D). In FIG. 2A, the total number of the relevant species of bacteria that engrafted were quantified in fecal samples at days 0, 3, 7, 10, 14, 56, and 84 after initiation of treatment with either placebo or an HHSP. In FIGS. 2B and 2C, the engrafting bacterial species were further divided into either long-term engrafting species (long-term engrafters) (FIG. 2B) or transient engrafting species (transient engrafters) (FIG. 2C). Engraftment was determined relative to the population of bacteria present at baseline (i.e., prior to the pre-treatment regimen). High confidence engrafting bacteria comprise species present in the drug product (i.e., HHSP) and not present in the pre-treatment baseline sample for an individual patient, but were observed in the patient at any time point post-treatment. This is a conservative measure of engraftment in that it does not include engraftment of a species that is present as a unique strain in the drug product and as a different strain of the same species in the patient microbiome at baseline.

[0099] FIG. 3 shows a comparison of the change in the spore-forming portion of the microbiome of ulcerative colitis patients from Arms A, B, C, and D, at various time points post initial dose of the HHSP. The change in the microbiome from the baseline composition is shown as a binary Jaccard distance between patients and their matched dose lot. Binary Jaccard measures the similarity of the spore-forming component of patient microbiomes to HHSP. A positive value indicates greater similarity to HHSP. The horizontal line indicates the composition of the spore-forming component of the patient microbiome at baseline (distance=0 by definition).

[0100] FIG. 4 shows a correlation between the concentrations of 7-α-dehydroxylated secondary bile acids and clinical outcome. At 8 weeks post initial treatment, ulcerative colitis patients from all treatment arms were categorized as being in remission or in non-remission. Then, the concentrations of the 7-α-dehydroxylated secondary bile acids were measured.

[0101] FIGS. 5A and 5B show the effects of secondary bile acids deoxycholic acid (DCA) and lithocholic acid (LCA) on the production of TNF-α (FIG. 5A) and IL-10 (FIG. 5B) in LPS-stimulated peripheral blood mononuclear cells (PBMCs) in vitro. In both FIGS. 5A and 5B, the bars shown correspond to a concentration of the bile acid used (12.5, 25, and 50 μM), with increase in concentration going from left to right.

[0102] FIGS. 6A, 6B, and 6C show a comparison of different tryptophan metabolite levels in the fecal samples of remitters (Remission) and non-remitters (Non-Remission) after HHSP administration (i.e., Arms B, C, and D) at 8 weeks post initial dosing (i.e., at the end of the treatment period). FIG. 6A shows a comparison of the indole level. FIG. 6B shows a comparison of the 3-methylindole level. FIG. 6C also shows a comparison of the 3-methylindole level, but the patient samples were divided based on the presence of Ruminococcus bromii and Eubacterium siraeum: (i) none “(0)”, (ii) one (i.e., either of the two species) “(1)”, or (iii) both “(2)”.

[0103] FIGS. 7A and 7B shows a comparison of the ability of different tryptophan metabolites (FIG. 7A) or bacterial supernatants (FIG. 7B) to induce AhR-mediated cyp1a1 expression relative to β-actin in epithelial colonic organoids. In FIG. 7A, the metabolites (3-indole acetic acid, 3-methylindole, indole, indoleacrylate, 3-indole butyric acid, and indolepropionic acid, IPA) were added at three different concentrations (50, 100, and 200 μM), with increasing concentrations from right to left. Untreated epithelial organoids (Untd) were used as a negative control. In FIG. 7B, supernatants were collected from cultures containing different bacteria (Clostridium sporogenes 1, Clostridium sporogenes 2, Peptostreptococcus stomatis, Clostridium glycolicum, Bacteroides sp. 4 1 36) and were provided to the epithelial organoids at two different concentrations (5% and 2% final concentration), with the left bar corresponding to the higher concentration. The SCFAs and tryptophan metabolites present in each supernatant (from FIGS. 17 and 18) are indicated. IPA: indolepropionic acid; IAcryl: Indole acrylate; 3Mind: 3-methylindole; I3Carb: indole-3-carbinol; C3: propionate; C4: butyrate; C5: valerate; C6: hexanoate; BCFA: branch chain fatty acids.

[0104] FIG. 8A provides a schematic diagram of the epithelial barrier integrity assay and FIG. 8B provides a comparison of the epithelial permeability after exposure to different concentrations of IFN-γ.

[0105] FIGS. 9A and 9B show a comparison of the ability of different bacterial metabolites (butyrate, propionate, and IPA) (FIG. 9A) and different bacterial species (FIG. 9B) to restore barrier integrity in the presence of IFN-γ, as measured by the epithelial barrier integrity assay shown in FIG. 8A. In FIG. 9A, each of the metabolites tested was added to the assay at four different concentrations (right to left: 0.625 mM, 1.25 mM, 5 mM, and 10 mM). Untreated samples (i.e., no metabolite, no IFN-γ) were used as a negative control. Samples treated with 5 ng/mL of IFN-γ alone (no metabolite) were used as a positive control. The dotted horizontal line represents the permeability of the negative control. Permeability values below the dotted line indicate barrier protection while values above represent additional barrier damage compared to that caused by INF-γ alone (no bacteria). In FIG. 9B, the culture supernatants of different bacterial species tested included Escherichia coli, Acidaminococcus sp. D21, Bacteroides fragilis, Collinsella intestinalis, Bifidobacterium bifidum, Peptoniphilus harei (15% final supernatant concentration). Untreated samples (i.e., no bacteria, no IFN-γ) were used to measure the barrier permeability in the absence of IFN-γ driven barrier defect. Butyrate (5 mM) was added as a positive control as it is known to enhance epithelial barrier junction integrity via multiple mechanisms. Under these assay conditions, addition of 5 mM butyrate was known to decrease permeability by 50%.

[0106] FIG. 10 shows the treatment schedule for assessing the effect of spore-forming bacteria on ulcerative colitis in an adoptive T cell transfer animal model.

[0107] FIG. 11 shows a comparison of the total pathology score in the ulcerative colitis animal model after treatment with (i) antibiotics alone (ABX), (ii) an HHSP, or (iii) DE1 (a composition of 14 spore forming human commensal species obtained by axenic fermentation). Naïve animals and untreated disease animals (Disease) were used as negative and positive controls, respectively. All comparisons were made to the ABX arm. “**” indicates a p value of <0.01 compared to the antibiotics alone control. “***” indicates a p value of <0.001 compared to the antibiotics alone control.

[0108] FIGS. 12A, 12B, 12C, 12D, and 12E show a comparison of mRNA expression level measured by qPCR of different genes from the lamina propria of colons in the ulcerative colitis animal model after treatment with one of the following: (i) antibiotics alone (ABX), (ii) HHSP or (iii) DE1. Naïve animals, untreated disease animals (Disease) and ABX only animals were used as controls. FIGS. 12A and 12B show the expression level of the pro-inflammatory genes, I11b and TNFa, respectively. FIGS. 12C, 12D, and 12E show the expression level of different epithelial tight junction protein molecules, Tjp1, Tjp2, and Ocln, respectively. In FIGS. 12A, 12B, 12C, 12D, and 12E, the mRNA expression level of the different genes are shown relative to GAPDH expression. Statistical comparisons are to ABX only animals.

[0109] FIG. 13 provides a table showing the ability of different bacterial strains to inhibit histone deacetylate (HDAC) activity. The bacterial strains tested were grown in PY medium supplemented with one of seven different nutrient sources at 0.5% final concentration (glucose, fucose, sucrose, pectin, fos/inulin, starch, or mucin). HDAC inhibition activity is shown as a fraction compared to media only controls (HDACi=1-(HDACsample/HDACmedium control). If a strain exhibits HDACi activity of at least 0.25 in any nutrient, or 0.18 in fucose, it is considered to have HDACi activity and it is marked with “1”. Strains that do not pass the cutoff are indicated by “0”. The different bacterial strains are categorized into 7 different clusters (0 to 6) based on the pattern of HDAC inhibition activity across nutrient sources (far right column).

[0110] FIGS. 14A and 14B show the ability of different bacterial metabolites (FIG. 14A) or a supernatant of a healthy human spore preparation (HHSP) (FIG. 14B) to inhibit IL-8 secretion by HT29 epithelial cells (IECs) after stimulation with TNF-α. In FIG. 14A, the SCFAs of butyrate (left set of bars), propionate (middle set of bars), and acetate (right set of bars) show a dose-dependent anti-inflammatory effect on IECs shown as percent IL-8 inhibition compared to TNF-α only control. FIG. 14B, shows a dose-dependent anti-inflammatory effect of supernatant of a HHSP culture shown as a decrease in the level of IL-8 protein produced by the IECs after TNF-α treatment. IECs that were either not stimulated with TNF-α or TNF-α alone were used as controls (negative and positive controls, respectively).

[0111] FIGS. 15A and 15B show the relationship between HDAC inhibition (x-axis) and anti-inflammatory effects in IECs (as measured by the relative decrease in IL-8 production after TNF-α stimulation) using supernatants from different bacterial species. Each circle represents a separate supernatant from a bacterial strain/nutrient combination as shown in FIG. 13. Positive y-axis values indicate anti-inflammatory activity. Negative y-axis values indicate higher IL-8 production than the TNF-α only control. FIG. 15A shows a general positive correlation between HDAC inhibition and anti-inflammatory activity (dashed line), although some supernatants had significantly lower anti-inflammatory activity than expected by HDAC. FIG. 15B separates data points with pro-inflammatory activity in a separate assay (increased IL-8 secretion in the absence of TNF-α stimulation). In these supernatants, HDAC inhibition did not translate into anti-inflammatory activity in IECs.

[0112] FIG. 16 shows the relationship between HDAC inhibition (x-axis) and Wnt activation (y-axis) in HEK-293 Wnt-STF (as measured by luciferase activity after bacterial supernatant stimulation) using supernatants from different bacterial species. Each circle represents a separate supernatant from a bacterial strain/nutrient combination as shown in FIG. 13.

[0113] FIG. 17 provides phenotypic screening results of multiple strains of a single Lachnospiraceae species. Each row corresponds to a unique strain, and each column corresponds to an in vitro screening phenotype. A dark shade indicates that the strain is positive for the particular phenotype; a light shade indicates that a strain is weakly positive for the phenotype; and white indicates the strain is negative. The different in vitro screening phenotypes include bile acid activities (bile salt hydrolase (BSH), hydroxysteroid dehydrogenase (HSDH), 7α-dehydroxylase) and pro-inflammatory effects (as measured by production of IL-8 by IECs when exposed to a culture supernatant from the individual strain).

[0114] FIG. 18 provides a table listing bacterial species and the short chain fatty acids (SCFAs), medium chain fatty acids (MCFAs), and branched chain fatty acids (BCFAs) produced by each of the species. “LOD” indicates that the concentration of the fatty acid was less than the limit of detection. The limit of detection for each of the fatty acids is provided in the row labeled “Limit of Detection (LOD).” The SCFAs measured included: acetic acid, propanoic acid, and butanoic acid. The MCFAs measured included: pentanoic acid, hexanoic acid, heptanoic acid. The BCFAs measured included: 2-methyl-propanopic acid, 3-methyl-butanoic acid, and 4-methyl-pentaoic acid.

[0115] FIG. 19 provides a table listing bacterial species and tryptophan metabolites produced by the species. “LOD” indicates that the concentration of the fatty acid was less than the limit of detection. The limit of detection for each of the fatty acids is provided in the row labeled “Limit of Detection (LOD).” The tryptophan metabolites measured included: indole, 3-methylindole, indol-3-propanoic acid, indole-3-butyric acid, 3-indoleacrylic acid, tryptamine, indole-3-acetic acid, 3-indole-glycoxylic acid, 2-picolinic acid, and 5-hydroxytryptamine.

[0116] FIGS. 20A to 20T provide a comparison of various functional attributes of eight DEs disclosed herein after they were cultured in vitro: (1) DE1 (DE286037.1); (2) DE3 (DE984662.1); (3) DE4 (DE002165.1); (4) DE5 (DE464167.1); (5) DE6 (DE522292.1); (6) DE7 (DE247030.1); (7) DE8 (DE349441.1); and (8) DE9 (DE821956.1). The following functional attributes are shown: (i) biomass (FIG. 20A); (ii) ability to inhibit HDAC activity (FIG. 20B); (iii) ability to inhibit IL-8 secretion by HT29 epithelial cells (IECs) after stimulation with TNF-α (FIG. 20C); (iv) ability to induce IL-8 production by IECs (FIG. 20D); (v) ability to restore barrier integrity in the presence of IFN-γ, as measured by the epithelial barrier integrity assay (FIG. 20E); (vi) ability to express catalase activity (FIG. 20F); (vii) ability to activate toll-like receptor 4 (TLR4) (FIG. 20G); (viii) ability to activate TLR5 (FIG. 20H); (ix) ability to produce butyrate (FIG. 20I); (x) ability to produce propionate (FIG. 20J); (xi) ability to produce valerate (FIG. 20K); (xii) ability to produce hexanoate (FIG. 20L); (xiii) ability to produce indole (FIG. 20M); (xiv) ability to downmodulate the transcription of CXCL1, CXCL2, CXCL3, and CXCL11 (pro-inflammatory cytokines expressed in ulcerative colitis (UC) patients) in epithelial colonic organoids (FIGS. 20N, 200, 20P, and 20Q, respectively); and (xv) ability to activate the Wnt signaling pathway, as determined by both CD44 and LRP6 gene expression, and HEK-293 Wnt-STF reporter assay (FIGS. 20R, 20S, and 20T, respectively).

[0117] FIGS. 21A to 21Q provide a comparison of various functional attributes of fourteen additional DEs disclosed herein after they were cultured in vitro: (1) DE1 (DE286037.1); (2) DE6 (DE522292.1); (1) DE10 (DE698478.1); (2) DE11 (DE559846.1); (3) DE12 (DE405816.1); (4) DE13 (DE056280.1); (5) DE14 (DE390874.1); (6) DE15 (DE299561.1); (7) DE16 (DE504874.1); (8) DE17 (DE608959.1); (9) DE18 (DE124702.1); (10) DE19 (DE211714.1); (11) DE20 (DE313669.1); (12) DE21 (DE762708.1); (13) (13) DE22 (DE787951.1); and (14) DE23 (DE291114.1. For comparison purposes, DE1 and DE6 were included. The following functional attributes are shown: (i) biomass (FIG. 21A); (ii) ability to inhibit HDAC activity (FIG. 21B); (iii) ability to inhibit IL-8 secretion by HT29 epithelial cells (IECs) after stimulation with TNF-α (FIG. 21C); (iv) ability to restore barrier integrity in the presence of IFN-γ, as measured by the epithelial barrier integrity assay (FIG. 21D); (v) ability to induce IL-8 production by IECs (FIG. 21E); (vi) ability to activate TLR4 (FIG. 21F); (v) ability to activate TLR5 (FIG. 21G); (vii) ability to produce butyrate (FIG. 21H); (viii) ability to produce propionate (FIG. 21I); (ix) ability to produce valerate and hexanoate (FIGS. 21J and 21K, respectively); (x) ability to produce indole and 3-methyl indole (FIGS. 21L and 21M, respectively); (x) bile salt hydrolase activity (as measured by the amount of primary bile acids produced) (FIG. 21N); and (xi) 7α-dehydroxylase, α-hydroxysteroid dehydrogenase, and 7β-hydroxysteroid dehydrogenase activity (as measured by the amount of different secondary bile acids produced) (FIGS. 21N, 210, and 21P, respectively). In FIGS. 21B to 21E, DE9 (DE821956.1), which was designed not to be anti-inflammatory, was used as a negative control.

[0118] FIGS. 22A to 22R provide a comparison of various functional attributes of twelve different DEs disclosed herein after they were cultured in vitro: (1) DE24 (DE070875.1); (2) DE26 (DE343482.1); (3) DE25 (DE616787.1); (4) DE30 (DE068851.1); (5) DE28 (DE055548.1); (6) DE27 (DE033849.1); (7) DE29 (DE865106.1); (8) DE32 (DE779249.1); (9) DE33 (DE433598.1); (10) DE31 (DE502105.1); (11) DE34 (DE266386.1); and (12) DE35 (DE278442.1). As negative controls, DE9 and DE38 (DE533175.1) were used. As described herein, DE9 and DE38 are bacterial compositions that were designed to not have one or more of the functional properties disclosed herein (e.g., anti-inflammatory activity). The following functional attributes are shown: (i) biomass (FIG. 22A); (ii) ability to inhibit HDAC activity (FIG. 22B); (iii) anti-inflammatory activity (as measured by the ability to inhibit IL-8 secretion by HT29 epithelial cells (IECs) after stimulation with TNF-α (FIG. 22C); (iv) pro-inflammatory activity (as measured by the ability to induce IL-8 production by IECs) (FIG. 22D); (v) ability to restore barrier integrity in the presence of IFN-γ, as measured by the epithelial barrier integrity assay (FIG. 22E); (vi) ability to produce butyrate (FIG. 22F); (vii) ability to produce valerate (FIG. 22G); (viii) ability to produce hexanoate (FIG. 22H); (ix) ability to produce indole (FIG. 22I); (x) ability to produce 3-methyl indole (FIG. 22J); (xi) bile salt hydrolase activity (as measured by the amount of primary bile acids produced) (FIG. 22K); (xii) 7α-dehydroxylase activity (as measured by the amount of deoxycholic acid (DCA) and lithocholic acid (LCA) secondary bile acids produced) (FIG. 22L); (xiii) α-HSDH activity (as measured by the amount of oxo-secondary bile acids produced) (FIG. 22M); (xiv) ability to downmodulate the transcription of CXCL1 and ICAM1 (proteins associated with pro-inflammatory response) in epithelial colonic organoids (FIGS. 22N and 22P, respectively); (xv) ability to increase AhR-mediated Cyp1a1 expression in epithelial colonic organoids (FIG. 22O) (xvi) ability to activate TLR4 (FIG. 22Q); and (xvii) ability to activate TLR5 (FIG. 22R);

[0119] FIGS. 23A to 23H provide comparison of additional properties (e.g., functional features) of DEs disclosed herein to FMT (fecal microbiota transplantation) and HHSP (spore-prep composition). In FIGS. 23A to 23D, both DE1 (DE286037.1) and DE2 (DE924221.1) are compared to FMT and HHSP. In FIGS. 23E to 23H, DE1 is compared to HHSP. The different properties shown include: (i) biomass (FIG. 23A); (ii) inhibition of HDAC activity (FIG. 23B); (iii) pro-inflammatory activity (FIG. 23C); (iv) anti-inflammatory activity (FIG. 23D); (v) valerate production (FIG. 23E); (vi) hexanoate production (FIG. 23F); (vii) indole production (FIG. 23G); and (viii) 3-methyl indole (skatole) production (FIG. 23H).

[0120] FIGS. 24A and 24B shows on x-axis the differential gene expression observed in colonic biopies in subjects with IBD compared to subjects without IBD in the HMP2 database; on the y-axis shows differential gene expression in colonic organoids when exposed to media alone compared to media plus TNFα; each point corresponds to a gene measured in vitro in colonic organoids and in colonic biopsies of human subjects. Each point is based on the change in gene expression when colonic organoids are exposed to supernatant from cultured HSSP, a spore preparation from healthy donors (24A, left) or from DE1 (DE286037.1) (24B, right). Only genes that were differentially expressed in organoids after treatment with TNFα (p<0.05) are shown. Lighter shaded points represent genes that were differentially expressed both in organoids after TNFα treatment and HMP2, and were not significantly changed by treatment with bacterial supernatants. Darker shaded points represent genes that were differentially expressed both in organoids after TNFα treatment and HMP2, and responded to bacterial supernatant treatment (i.e. their expression was elevated in organoids treated with TNF and lowered with supernatant treatment, or if their expression was decreased in organoids treated with TNF but increased with supernatant treatment).

[0121] FIGS. 25A to 25C provide a comparison of DE1, FMT, and HHSP in their ability to downmodulate the transcription of TNF-α-mediated CXCL1 (FIG. 25A), CXCL3 (FIG. 25B), and ICAM1 (FIG. 25C) expression in epithelial colonic organoids. For FMT, two of the samples were from a healthy donor (FMT #1 and FMT #3) and one sample was from a patient with ulcerative colitis (FMT #2). “Media (+)” (media with TNF-α) and “Media (−)” (media alone, no TNF-α) were used as positive and negative controls, respectively.

[0122] FIGS. 26A and 26B provide a comparison of the different DEs disclosed herein to FMT and DXE (HHSP) in their ability to produce indole and butyrate, respectively.

[0123] FIGS. 27A to 27C show the efficacy of the combination of DE1 and anti-PD-1 antibody in treating MC38 tumor in an animal model. FIG. 27A shows the treatment schedule. All of the animals were treated with the DE1 composition. Some of the animals additionally received the anti-PD-1 antibody, while the control animals received an isotype control antibody. FIG. 27B shows a comparison of tumor volume in the animals from the different treatment groups from days 6 to 17 post tumor inoculation. FIG. 27C provides a comparison of the percentage of CD8 T cells (left graph) and CD8 T cell:Treg ratio (right graph) in the tumors of the animals from the different treatment groups.

[0124] FIGS. 28A to 28C show the efficacy of the combination of DE2 and anti-PD-1 antibody in treating MC38 tumor in an animal model. Overall treatment schedule is the same as in FIG. 27A. Instead of DE1, the animals were treated with the DE2 composition. Some of the animals additionally received the anti-PD-1 antibody, while the control animals received an isotype control antibody. FIG. 28A shows a comparison of tumor volume in the animals from the different treatment groups from days 6 to 17 post tumor inoculation. FIGS. 28B and 28C provide a comparison of the percentage of CD8 T cells and CD8 T cell:Treg ratio, respectively, in the tumors of the animals from the different treatment groups.

[0125] FIGS. 29A to 29E show the efficacy of the combination of DE1 and anti-PD-1 antibody in treating BP tumor in an animal model. FIG. 29A shows the treatment schedule. All of the animals were treated with the DE1 composition. Some of the animals additionally received the anti-PD-L1 antibody, while the control animals received an isotype control antibody. FIG. 29B shows a comparison of tumor volume in the animals from the different treatment groups over a course of 15 days from tumor inoculation. FIGS. 29C, 29D, and 29E show a comparison of the percentage of CD8 T cells, CD8 T cell:Treg ratio, and percentage of CD4 T cells, respectively, in the tumors of the animals from the different treatment groups.

[0126] FIG. 30 provides a table identifying the bacterial species included in the designed compositions DE-DE9. SEQ ID NOs for the 16S sequences of the bacterial species are also provided. “0” indicates that the bacterial species is not included; “1” indicates that the bacterial species is included in the given composition.

[0127] FIG. 31 provides a table identifying the bacterial species included in the designed compositions DE10-DE23. SEQ ID NOs for the 16S sequences of the bacterial species are also provided. “0” indicates that the bacterial species is not included; “1” indicates that the bacterial species is included in the given composition.

[0128] FIG. 32 provides a table identifying the bacterial species included in the designed compositions DE24-DE38. SEQ ID NOs for the 16S sequences of the bacterial species are also provided. “0” indicates that the bacterial species is not included; “1” indicates that the bacterial species is included in the given composition.

### DETAILED DESCRIPTION OF DISCLOSURE

[0129] Applicant has discovered that bacterial compositions comprising certain species of commensal bacteria exhibit certain functional features (e.g., those disclosed herein) and that such compositions can be used to treat and/or prevent a range of diseases and disorders, e.g., those associated with dysbiosis of the intestinal microbiome. Accordingly, Applicant has identified species of commensal bacteria that can be combined to design bacterial compositions disclosed herein. Detailed disclosure of the bacterial species and the functional features of interest are provided in the present disclosure.

### I. Bacterial (Microbiome) Compositions

[0130] Bacteria discovered to be associated with certain functional features (e.g., those described herein) can be used to design therapeutic compositions (e.g., bacterial compositions) for treating and/or preventing a range of diseases and disorders, such as those associated with dysbiosis of the intestinal microbiome. Such compositions can include material directly derived from feces of healthy humans. The compositions comprising material directly derived from human feces can, in some cases, contain spore-forming bacteria (SFB) derived from human feces as the sole type of bacteria present in the composition. In other embodiments, such compositions can comprise spores as the sole type of bacteria present in the composition (healthy human spore product; HHSP). Collectively, SFB and HHSP are referred to herein as “spore compositions.”

[0131] In some cases, one or more bacteria associated with improvement in a disease or disorder (e.g., inflammatory disease) can be combined to produce the designed compositions (DEs) disclosed herein. In certain embodiments, one or more bacteria associated with certain functional features of interest (e.g., those described herein) can be combined in the bacterial compositions disclosed herein. By combining different bacterial species disclosed herein, the designed compositions disclosed herein can target different biological pathways. Not to be bound by any particular theory, such ability allows the designed compositions disclosed herein to be useful for the treatment of a wide range of diseases and disorders, e.g., those associated with a dysbiosis of the intestinal microbiome. Species in a designed composition can be spore-formers (in some cases, in spore form), non-spore formers, or a combination thereof. Collectively, spore compositions and designed compositions are referred to herein as “microbiome compositions.” Applicants have therefore discovered that efficacious microbiome compositions can be manufactured and/or designed based on a combination of identified features.

[0132] Accordingly, provided herein are bacteria and combinations of bacteria useful for treating and/or preventing one or more signs or symptoms of a disease or disorder associated with dysbiosis of the gastrointestinal microbiome, e.g., ulcerative colitis. In general, such compositions include one or more of the bacteria described herein as exhibiting one or more of the functional features of interest disclosed herein (e.g., associated with remission in UC or having one or more features associated with remission in UC).

[0133] In some embodiments, the amount, level, identity, presence, and/or ratio of bacteria in the microbiome (e.g., gastrointestinal microbiome) of a subject is manipulated to treat, prevent, delay, or ameliorate one or more signs or symptoms of a disease or disorder associated with dysbiosis of the gastrointestinal microbiome (e.g., an IBD, such as ulcerative colitis).

[0134] The term “microbial engraftment” or “engraftment” refers to the establishment of OTUs (bacterial species or strains) comprising a therapeutic microbial composition, e.g., a bacterial composition, in a target niche that are absent or undetectable in a treated subject prior to treatment. The microbes comprising the engrafted ecology are present in the therapeutic microbial composition and establish as constituents of the subject's microbial ecology. Engrafted OTUs can establish for a transient period of time, or demonstrate long-term stability in the microbial ecology that populates the subject post treatment with a therapeutic microbial composition. Without committing to any theory, the drug product (i.e., bacterial compositions disclosed herein) may catalyze a shift from a dysbiotic ecology to one representative of a healthy state, either by engraftment of drug product species, promoting ecological conditions favorable for the growth of non-product commensal microbes present in the patient (augmentation), or both.

[0135] As used herein, engraftment is indicated by one or more of the following outputs: (i) strain level engraftment, (ii) species-level population engraftment, (iii) species-level subject engraftment, and (iv) putative engraftment. “Strain level engraftment” is determined using an assay in which single nucleotide variant (SNV) frequencies unique to the drug product composition are used to determine whether strains of species detected in treated subjects are significantly more similar to strains in the composition compared to strains of species detected in subjects prior to treatment. Strain level engraftment is measured on a per-subject and per-species basis. “Species-level population engraftment” refers to significantly increased prevalence (p<=0.05) of a species in treated subjects relative to non-treated subjects at any post-treatment time point as measured with a Fisher's exact test, with the requirement that the species was not detected in treated subjects prior to treatment but was detected in the composition. Species-level population engraftment is a population-level measure and requires a significant (p<=0.05) difference across the population treated with a particular regimen compared to placebo. “Species-level subject engraftment” refers to the detection of a species present in the HHSP in a subject post-treatment when said species was not detected pre-treatment in that subject. “Putative engraftment” refers to significantly increased prevalence (p<=0.05) of a species in treated subjects relative to non-treated subjects at any post-treatment time point as measured with a Fisher's exact test. The putative engraftment further requires that the species was detected in the drug product composition and may or may not be present in the treated subject prior to treatment. “Putative engraftment” is a population level statistic. Putative engraftment can be further evaluated using strain level metrics for engraftment.

[0136] In some embodiments, the term engraftment can be further divided into long-term engraftment and transient engraftment. “Long-term engraftment” refers to the ability of bacterial species or strains disclosed herein to durably reside in the gastrointestinal tracts of subjects after treatment. Such species or strains are described herein as “long-term engrafter” (LTE). In some embodiments, long-term engrafters continue to be present in the subject (e.g., in the gastrointestinal tract) for about 4 weeks, about 8 weeks, about 12 weeks or longer after the start of dosing of a bacterial composition disclosed herein. “Transient engraftment” refers to the ability of bacterial species or strains (e.g., those disclosed herein) to reside in the gastrointestinal tracts of subjects after treatment, but are only detected in the fecal samples of subjects for a limited period of time. In some embodiments, if bacteria or combinations of bacteria are detected in the fecal sample of a subject, it is generally believed that those bacteria or combinations of bacteria remain present within the gastrointestinal tract. Such species or strains are described herein as “transient engrafter” (TE). In some embodiments, transient-engrafters are no longer present in the subject (e.g., no longer detected in the fecal sample of the subject) about 1 week, about 2 weeks, or about 4 weeks after the start of dosing (i.e., administering a bacterial composition disclosed herein. Non-limiting examples of LTEs and TEs are provided in Table 5.

[0137] It is a key feature of a microbiome composition (e.g., designed compositions) as provided herein that one or more species or OTUs of bacteria in the microbiome composition engraft in a subject treated with the composition, e.g., a subject that responds to the treatment by an improvement in at least one sign or symptom of the disease being treated. In some embodiments, a microbiome composition disclosed herein comprises one or more species or OTUs of bacteria that are long-term engrafters. In other embodiments, a microbiome composition comprises one or more species or OTUs of bacteria that are transient engrafters. In certain embodiments, a microbiome composition comprises both long-term engrafters and transient engrafters. In certain embodiments, a bacterial composition disclosed herein comprises two, three, four, five, six, seven, eight, nine, ten or more long-term engrafters. In some embodiments, a bacterial composition comprises two, three, four, five, six, seven, eight, nine, ten or more transient engrafters. In further embodiments, a bacterial composition disclosed herein comprises three or more transient engrafters and/or seven or more long-term engrafters.

[0138] As used herein, “augmentation” refers to the establishment or significant increase of a population of microbes, or selected species or OTUs, that are (i) absent or undetectable (as determined by the use of known and/or specified genomic or microbiological techniques) in an administered therapeutic microbiome composition, (ii) absent, undetectable, or present at low frequencies in the host niche (as example: gastrointestinal tract (GI tract), skin, anterior-nares, or vagina) before treatment with the microbiome composition compared to after treatment with the microbiome composition, and (iii) are found in the host (subject) after the administration of the microbiome composition or are significantly increased after treatment, for instance about 2-fold, about 5-fold, about 1×10², about 1×10³, about 1×10⁴, about 1×10⁵, about 1×10⁶, about 1×10⁷ fold, or greater than 1×10⁸ fold, in cases where they were present at low frequencies. Microbes comprising an augmented population can be derived from exogenous sources such as food and the environment or grow out from micro-niches within the host where they reside at low frequency. In some aspects of the invention, after treatment with a microbiome composition as provided herein, one or more species or OTUs of bacteria are augmented in the treated subject, e.g., a subject that responds to the treatment by an improvement in at least one sign or symptom of the disease being treated.

[0139] Without committing to any theory, administration of a therapeutic microbiome composition may induce a shift in the target niche, e.g., the GI tract, that promotes favorable conditions for the growth of certain commensal microbes, i.e., they are augmented. In the absence of treatment with a therapeutic microbiome composition, although the host may be exposed to or harbor these commensal microbes, sustained growth and the positive health effects associated with those microbes are not observed or are less frequently observed in a population treated with the microbiome composition.

[0140] In some embodiments, a bacterial composition comprises a population of bacteria that has been purified from a biological material (e.g., fecal materials, such as feces or materials isolated from the various segments of the small and large intestines) obtained from a mammalian donor subject (e.g., a healthy human). In some embodiments, the biological material (e.g., fecal material) is obtained from multiple donors (e.g., 2, 3, 4, 5, 6, 7, 8, 9, 10, 15, 20, 25, 30, 35, 40, 45, 50, 75, 100, 200, 300, 400, 500, 750, 100, or from greater than 1000 donors), and the materials are pooled prior to purification or after purification of the desired bacteria. In other embodiments, the biological material (sample) can be obtained from a single donor subject at multiple times and two or more samples pooled, e.g., 2, 3, 4, 5, 6, 7, 8, 9, 10, 15, 20, 25, 30, 32, 35, 40, 45, 48, 50, 100 samples from a single donor. Methods of making such preparations include treatment of the feces with chloroform, acetone, ethanol, and the like, e.g., see PCT/US2014/014745 and U.S. Pat. No. 9,011,834, which are incorporated herein by reference in their entirety.

[0141] In embodiments, a microbiome composition derived from feces is depleted in residual habitat products. “Residual habitat products” refers to material derived from the habitat of a microbiota within or on a human or animal excluding the microbiota. An individual's microbiota is in, for example, feces in the gastrointestinal tract, on the skin itself, in saliva, mucus of the respiratory tract, or secretions of the genitourinary tract, all of which contain biological and other matter associated with the microbial community. “Substantially free of residual habitat products” means that the bacterial composition contains a reduced amount of the biological matter associated with the microbial environment on or in the human or animal subject and is about 100% free, about 99% free, about 98% free, about 97% free, about 96% free, or about 95% free of any contaminating biological matter associated with the microbial community or the contaminating matter is below a level of detection. Residual habitat products can include abiotic materials (including undigested food) or it can include unwanted microorganisms. Substantially free of residual habitat products can also mean that the bacterial composition contains no detectable cells from a human or animal and that only microbial cells are detectable. In some embodiments, substantially free of residual habitat products can mean that the bacterial composition contains no detectable viral (including bacterial viruses (i.e., phage)), fungal, mycoplasmal contaminants. In other embodiments, it means that fewer than about 1×10⁻²%, about 1×10⁻³%, about 1×10⁻⁴%, about 1×10⁻⁵%, about 1×10⁻⁶%, about 1×10⁻⁷%, about 1×10⁻⁸% of the viable cells in the bacterial composition are human or animal, as compared to microbial cells. There are multiple ways to accomplish reduced presence of residual habitat products, none of which are limiting. Thus, contamination can be reduced by isolating desired constituents through multiple steps of streaking to single colonies on solid media until replicate (such as, but not limited to, two) streaks from serial single colonies have shown only a single colony morphology. Alternatively, reduction of contamination can be accomplished by multiple rounds of serial dilutions to single desired cells (e.g., a dilution of about 10⁸ or about 10-9), such as through multiple 10-fold serial dilutions. This can further be confirmed by showing that multiple isolated colonies have similar cell shapes and Gram staining behavior. Other methods for confirming adequate reduction of residual habitat products include genetic analysis (e.g., PCR, DNA sequencing), serology and antigen analysis, enzymatic and metabolic analysis, and methods using instrumentation such as flow cytometry with reagents that distinguish desired constituents from contaminants.

### HHSP Compositions

[0142] Generally, in an HHSP composition disclosed herein, the bacterial material is substantially composed of viable bacterial spores as the live component.

[0143] As used herein, the term “spore” or “endospore” refers to an entity, particularly a bacterial entity, which is in a dormant, non-vegetative and non-reproductive stage. Spores are generally resistant to environmental stress such as radiation, desiccation, enzymatic treatment, temperature variation, nutrient deprivation, oxygen, and chemical disinfectants. In some embodiments, a spore or spore population is resistant to 50% ethanol.

[0144] A “spore population” refers to a plurality of spores present in a composition. Synonymous terms used herein include spore composition, spore preparation, ethanol treated spore fraction and spore ecology. A spore population can be purified from a fecal donation, e.g., via ethanol or heat treatment, or a density gradient separation or any combination of methods described herein to increase the purity, potency and/or concentration of spores in a sample. Alternatively, a spore population can be derived through culture methods starting from isolated spore former species or spore former OTUs or from a mixture of such species, either in vegetative or spore form.

[0145] In some embodiments, the spore preparation comprises spore forming species wherein residual non-spore forming species have been inactivated by chemical or physical treatments including ethanol, detergent, heat, sonication, and the like; or wherein the non-spore forming species have been removed from the spore preparation by various separations steps including density gradients, centrifugation, filtration and/or chromatography; or wherein inactivation and separation methods are combined to make the spore preparation. In yet another embodiment, the spore preparation comprises spore forming species that are enriched over viable non-spore formers or vegetative forms of spore formers. In this embodiment, spores are enriched by about 2-fold, about 5-fold, about 10-fold, about 50-fold, about 100-fold, about 1000-fold, about 10,000-fold or greater than about 10,000-fold compared to all vegetative forms of bacteria. In yet another embodiment, the spores in the spore preparation undergo partial germination during processing and formulation such that the final composition comprises spores and vegetative bacteria derived from spore forming species.

[0146] The term “germinant” refers to a material or composition or physical-chemical process capable of inducing vegetative growth of a bacterium that is in a dormant spore form, or group of bacteria in the spore form, either directly or indirectly in a host organism and/or in vitro.

[0147] The term “sporulation induction agent” refers to a material or physical-chemical process that is capable of inducing sporulation in a bacterium, either directly or indirectly, in a host organism and/or in vitro.

[0148] The term “increase production of bacterial spores” includes an activity or a sporulation induction agent. “Production” in this context includes conversion of vegetative bacterial cells into spores and augmentation of the rate of such conversion, as well as decreasing the germination of bacteria in spore form, decreasing the rate of spore decay in vivo, or ex vivo, or to increasing the total output of spores (e.g., via an increase in volumetric output of fecal material).

[0149] In some embodiments, the preparation of an HHSP includes suspending a sample in ethanol, e.g., at least about 30%, at least about 40%, at least about 50%, at least about 55%, at least about 60%, at least about 65%, at least about 70%, at least about 75%, at least about 80%, at least about 85%, at least about 90%, at least about 95%, or at least about 100%. In some cases, the preparation of an HHSP includes suspending a sample in about 30 to about 100% ethanol, about 40 to about 80% ethanol, about 50 to about 80% ethanol, about 30% ethanol, about 40% ethanol, about 50% ethanol, about 55% ethanol, about 60% ethanol, about 65% ethanol, about 70% ethanol, about 75% ethanol, about 80% ethanol, about 85% ethanol, about 90% ethanol, about 95% ethanol, or about 100%.

[0150] As used herein, the terms “purify”, “purified” and “purifying” refer to the state of a population (e.g., a plurality of known or unknown amount and/or concentration) of desired bacteria or bacterial spores, that have undergone one or more processes of purification, e.g., a selection or an enrichment of the desired bacterium and/or bacterial spores, or alternatively a removal or reduction of residual habitat products as described herein. In some embodiments, a purified population has no detectable undesired activity or, alternatively, the level or amount of the undesired activity is at or below an acceptable level or amount. In other embodiments, a purified population has an amount and/or concentration of desired bacteria or bacterial spores, e.g., in general or of selected species, at or above an acceptable amount and/or concentration. In other embodiments, the ratio of desired-to-undesired activity (e.g., spores compared to vegetative bacteria), has changed by about 2-fold, about 5-fold, about 10-fold, about 30-fold, about 100-fold, about 300-fold, about 1×10⁴, about 1×10⁵, about 1×10⁶, about 1×10⁷, about 1×10⁸, or greater than about 1×10⁸. In other embodiments, a purified population of bacterial spores is enriched as compared to the starting material (e.g., a fecal material) from which the population is obtained. This enrichment can be by about 10%, about 20%, about 30%, about 40%, about 50%, about 60%, about 70%, about 80%, about 90%, about 95%, about 96%, about 97%, about 98%, about 99%, about 99.9%, about 99.99%, about 99.999%, about 99.9999%, about 99.9999%, or greater than about 99.999999% as compared to the starting material.

[0151] In some embodiments, a purified population of bacteria has reduced or undetectable levels of one or more pathogens (e.g., pathogenic bacteria, viruses, or fungi) one or more pathogenic activities, such as toxicity, an ability to cause infection of the mammalian recipient subject, an undesired immunomodulatory activity, an autoimmune response, a metabolic response, or an inflammatory response or a neurological response. In some embodiments, the pathogenic activity of the bacteria is reduced by at least about 5%, at least about 10%, at least about 20%, at least about 30%, at least about 40%, at least about 50%, at least about 60%, at least about 70%, at least about 80%, at least about 90%, at least about 95%, at least about 96%, at least about 97%, at least about 98%, at least about 99% compared to the reference bacteria. In some embodiments, a purified population of bacteria has reduced sensory components as compared to fecal matter, such as reduced odor, taste, appearance, and umami.

[0152] In some embodiments, a bacterial composition disclosed herein is substantially free of residual habitat products and/or substantially free of a detectable level of a pathogenic material (e.g., contains no detectable viral (including bacterial viruses (i.e., phage)), fungal, mycoplasmal, or toxoplasmal contaminants, or eukaryotic parasites, such as a helminth; or has an acceptable level of the foregoing. In some embodiments, a bacterial composition is substantially free of acellular material (e.g., DNA, viral coat material, or non-viable bacterial material).

### Designed Compositions (DEs)

[0153] Applicant has discovered that certain families, genera, species, and OTUs of bacteria in an HHSP are associated with an improvement (e.g., clinical remission) of a disease or disorder associated with dysbiosis of the gastrointestinal microbiome (e.g., ulcerative colitis). Furthermore, some of those families, genera, species, and OTUs were associated with engraftment. In addition, some families, genera, species, and OTUs were not present and/or not detected in a subject suffering from a disease or disorder associated with dysbiosis of the gastrointestinal tract (e.g., in an ulcerative colitis patient) and were augmented in a subject whose disease state was improved after treatment with an HHSP. Such bacteria that are associated with improvement in a subject are useful in compositions for treating a disease or disorder associated with dysbiosis (e.g., an inflammatory disease such as an IBD, e.g., ulcerative colitis). Furthermore, applicant has discovered that certain species are negatively associated with an improvement in disease or disorder associated with dysbiosis. In general, such species are not included in a composition useful for treating such diseases. Applicants have further identified families, genera, species, and OTUs of bacteria that exhibit certain functional features that can be useful in treating a wide range of diseases and disorders, including those associated with dysbiosis of the gastrointestinal tract (e.g., inflammatory diseases).

[0154] Accordingly, disclosed herein are microbiome compositions that have been designed to exhibit certain features. Non-limiting examples of such features include: (i) capable of engrafting when administered to a subject, (ii) capable of having anti-inflammatory activity, (iii) not capable of inducing pro-inflammatory activity, (iv) capable of producing a secondary bile acid (7α-deydroxylase and bile salt hydrolase activity), (v) not capable of producing ursodeoxycholic acid (7β-hydroxysteroid dehydrogenase activity); (vi) capable of producing a tryptophan metabolite (e.g., indole, 3-methyl indole, indolepropionic acid), (vii) capable of restoring epithelial integrity as determined by a primary epithelial cell monolayer barrier integrity assay, (viii) capable of being associated with remission of an inflammatory bowel disease, (ix) capable of not being associated with clinical non-remission of an inflammatory bowel disease, (x) capable of producing a short-chain fatty acid (e.g., butyrate, propionate), (xi) capable of inhibiting a HDAC activity, (xii) capable of producing a medium-chain fatty acid (e.g., valerate, hexanoate), (xiii) capable of expressing catalase activity, (xiv) capable of having alpha-fucosidase activity, (xv) capable of inducing Wnt activation, (xvi) capable of producing a B vitamin, (xvii) capable of modulating host metabolism of endocannabinoid, (xviii) capable of producing a polyamine and/or modulating host metabolism of a polyamine, (xix) capable of reducing fecal levels of a sphingolipid, (xx) capable of modulating host production of kynurenine, (xxi) capable of reducing fecal calprotectin level, (xxii) not capable of activating a toll-like receptor pathway (e.g., TLR4 or TLR5), (xxiii) capable of activating a toll-like receptor pathway (e.g., TLR4 or TLR5), or (xxiv) any combination thereof. Such microbiome compositions are described herein as “designed compositions” or DEs. Non-limiting examples of designed compositions are described, e.g., in FIGS. 33 34, and 35. In some embodiments, a designed composition disclosed herein comprises one, two, three, four, five, six, seven, eight, nine, ten, eleven, twelve, thirteen, fourteen, fifteen, sixteen, seventeen, eighteen, nineteen, twenty, twenty-one, twenty-two, or all of the above features. In certain embodiments, a designed composition of the present disclosure can comprise features that target multiple biological pathways, such that the same composition can be used to treat a wide range of diseases and disorders.

[0155] In some embodiments, a bacterial composition disclosed herein comprises one or more features selected from (i) capable of engrafting when administered to a subject; (ii) capable of having anti-inflammatory activity, (iii) not capable of inducing pro-inflammatory activity, (iv) capable of producing a secondary bile acid, (v) capable of producing a tryptophan metabolite, (vi) capable of restoring epithelial integrity as determined by a primary epithelial cell monolayer barrier integrity assay, (vii) capable of being associated with remission of an inflammatory bowel disease, (viii) capable of producing a short-chain fatty acid, (ix) capable of inhibiting a HDAC activity, (x) capable of producing a middle-chain fatty acid, (xi) capable of inducing Wnt activation, or (xi) any combination thereof. In some embodiments, the bacteria in a microbiome composition comprise one or more families, genera, species, or OTUs that are increased in the GI microbiome of a patient suffering from a disease or disorder associated with dysbiosis of the gastrointestinal tract (e.g., an ulcerative colitis patient) or population of patients prior to treatment with a complex microbiome composition, e.g., an HHSP composition, and increased in a subject or a population of subjects after treatment with an HHSP composition. In some embodiments, a bacterial composition disclosed herein comprises selected families, genera, species, or OTUs of bacteria. In general, the bacteria are commensal bacteria initially derived from, for example, a GI tract, typically the GI tract of a human, isolated and grown into pure cultures that can be used in a DE. These bacteria are selected for desired properties as described herein and used in designed composition. In some embodiments, a bacterial composition (e.g., designed compositions disclosed herein) comprises more than two types of bacteria. Accordingly, in some embodiments, a bacterial composition of the present disclosure comprises at least 2, at least 3, at least 4, at least 5, at least 6, at least 7, at least 8, at least 9, at least 10, at least 11, at least 12, at least 13, at least 14, at least 15, at least 16, at least 17, at least 18, at least 19, at least 20, or at least 21, 22, 23, 24, 25, 26, 27, 28, 29 30, 31, 32, 33, 34, 35, 36, 37, 38, 39, or at least 40, at least 50, or greater than 50 types of bacteria, as defined by species or operational taxonomic unit (OTU), or otherwise as provided herein. The bacteria in a composition may be present in approximately equal amounts of viable bacteria or each family, genus, species of OTU. In other embodiments of the invention, the bacteria are present in varying amounts in the composition. Non-limiting examples of bacterial species that can be used in designing the microbiome compositions disclosed herein are provided in Table 4, Table 5, FIG. 13, FIG. 17, FIG. 30, FIG. 31, and/or FIG. 32.

[0156] In some embodiments, the bacteria in a microbiome composition disclosed herein are from a family, genus, species, or OTU depleted in a subject suffering from a disease or disorder, such as those associated with a dysbiosis (e.g., ulcerative colitis patients) and/or typically present only at low levels or are absent in patients diagnosed with a disease or disorder, such as those associated with dysbiosis (e.g., ulcerative colitis). In some embodiments, a bacterial composition includes one or more additional bacteria that are present with high frequency in a population of healthy humans or subjects with a disease or disorder associated with dysbiosis (e.g., ulcerative colitis patients) but who are not exhibiting symptoms associated with active disease (i.e., in clinical remission).

[0157] In some embodiments, a bacterial composition disclosed herein comprises one or more bacteria from the family Ruminococcaceae, Lachnospiraceae, Sutterellaceae, Clostridiaceae, Erysipelotrichaceae, Bacteroidaceae, Akkermansiaceae, Peptostreptococcaceae, Eubacteriaceae, or Desulfovibrionaceae. In some embodiments, a bacterial composition can comprise at least one, two, three, four, five, six, seven, or all of the families listed.

[0158] In some embodiments, a bacterial composition comprises bacteria having at least about 97%, e.g., at least about 99%, identity to a 16S rDNA sequence (e.g., a full length or variable region of a 16S DNA sequence) to one or more of the following bacterial species: Gemmiger formicilis, Roseburia hominis, Clostridium bolteae, Parasutterella excrementihominis, Holdemania filiformis, Holdemania massiliensis, Bacteroides ovatus, Akkermansia muciniphila, Clostridium leptum, Bilophila wadsworthia, Dielma fastidiosa, Clostridium symbiosum, Eubacterium siraeum, Clostridium innocuum, Agathobaculum desmolans, Agathobaculum butyriciproducens, or Bacteroides vulgatus. In some embodiments, one or more of the bacteria in a composition has at least about 97% identity, e.g., about 99% identity, to a 16S rDNA of the foregoing species. In some embodiments, a bacterial composition can comprise at least one, two, three, four, five, six, seven, eight, nine, ten, eleven, twelve, thirteen, fourteen, fifteen, or all of the species listed.

[0159] In some embodiments, a bacterial composition comprises bacteria having at least about 97% identity, e.g., about 99% identity, to a 16S rDNA sequence (e.g., a full length or variable region or a 16S DNA sequence) to one or more of the following bacterial species: Gemmiger formicilis, Roseburia hominis, Clostridium bolteae, Parasutterella excrementihominis, Holdemania filiformis, Holdemania massiliensis, Bacteroides ovatus, Akkermansia muciniphila, Clostridium leptum, Bilophila wadsworthia, Dielma fastidiosa, Clostridium symbiosum, Eubacterium siraeum, Clostridium innocuum, Erysipelotrichaceae SC, Roseburia sp CAG 45 SC195, Lachnospiraceae SC188, Lachnospiraceae SC52, Clostridium SC125, Flintibacter SC49, Agathobaculum desmolans, Agathobaculum butyriciproducens, or Bacteroides vulgatus. In some embodiments, one or more of the bacteria in a composition has at least 97% identity, e.g., 99% identity, to a 16S rDNA of the foregoing species. In some embodiments, a bacterial composition can comprise at least one, two, three, four, five, six, seven, eight, nine, ten, eleven, twelve, thirteen, fourteen, fifteen, or all of the species listed.

[0160] In some embodiments, a bacterial composition comprises one or more bacteria selected from the group consisting of Gemmiger formicilis, Roseburia hominis, Clostridium bolteae, Holdemania filiformis, Holdemania massiliensis, Clostridium leptum, Dielma fastidiosa, Clostridium symbiosum, Eubacterium siraeum, and combinations thereof. In some embodiments, one or more of the bacteria in a composition has at least about 97% identity, e.g., about 99% identity, to a 16S rDNA of the foregoing species. In some embodiments, a bacterial composition can comprise at least one, two, three, four, five, six, seven, eight, or all of the bacterial species listed.

[0161] In some embodiments, a bacterial composition comprises one or more of the following bacterial species: Anaerotruncus colihominis, Blautia producta, Clostridium bolteae, Clostridium disporicum, Clostridium ghonii, Clostridium glycolicum, Clostridium innocuum, Clostridium lactatifermentans, Clostridium viride, Eubacterium sp. WAL 14571, Lachnospiraceae bacterium 3 1 57FA, Lachnospiraceae bacterium oral taxon F15, Lactonifactor longoviformis, or Ruminococcus lactaris. In some embodiments, one or more of the bacteria in a composition has at least 97% identity, e.g., 99% identity, to a 16S rDNA of the foregoing species.

[0162] In some embodiments, a bacterial composition (e.g., designed composition) disclosed herein comprises one or more of the bacterial species disclosed in Table 4, Table 5, FIG. 13, FIG. 17, FIG. 30, FIG. 31, and/or FIG. 32.

[0163] In some embodiments, a bacterial composition of the present disclosure comprises one or more bacteria comprising a 16S rDNA sequence that is at least about 85%, at least about 90%, at least about 95%, at least about 96%, at least about 97%, at least about 97.5%, at least about 98%, at least about 98.5%, at least about 99%, at least about 99.5%, or about 100% identical to a 16S rDNA sequence set forth in SEQ ID NOs: 1-14, 16-30, 32-36, 39, 41, 44, 45, 47-51, 59-62, 64-68, 72-76, and 102-398.

[0164] The term “16S sequencing” or “16S rDNA” or “16S” refers to sequence derived by characterizing the nucleotides that comprise the 16S ribosomal RNA gene(s). The bacterial 16S rDNA is approximately 1500 nucleotides in length and is used in reconstructing the evolutionary relationships and sequence similarity of one bacterial isolate to another using phylogenetic approaches. 16S sequences are used for phylogenetic reconstruction as they are in general highly conserved, but contain specific hypervariable regions that harbor sufficient nucleotide diversity to differentiate genera and species of most bacteria.

[0165] The term “V1-V9 regions” of the 16S rRNA refers to the first through ninth hypervariable regions of the 16S rRNA gene that are used for genetic typing of bacterial samples. These regions in bacteria are defined by nucleotides 69-99, 137-242, 433-497, 576-682, 822-879, 986-1043, 1117-1173, 1243-1294 and 1435-1465 respectively using numbering based on the E. coli system of nomenclature. Brosius et al., Complete nucleotide sequence of a 16S ribosomal RNA gene from Escherichia coli, PNAS 75(10):4801-4805 (1978). In some embodiments, at least one of the V1, V2, V3, V4, V5, V6, V7, V8, and V9 regions are used to characterize an OTU. In some embodiments, the V1, V2, and V3 regions are used to characterize an OTU. In another embodiment, the V3, V4, and V5 regions are used to characterize an OTU. In another embodiment, the V4 region is used to characterize an OTU. A person of ordinary skill in the art can identify the specific hypervariable regions of a candidate 16S rRNA by comparing the candidate sequence in question to a reference sequence and identifying the hypervariable regions based on similarity to the reference hypervariable regions, or alternatively, one can employ Whole Genome Shotgun (WGS) sequence characterization of microbes or a microbial community.

[0166] In some embodiments, a bacterial composition disclosed herein (e.g., designed compositions) comprises both a spore-forming bacteria and a non-spore forming bacteria. In some embodiments, a bacterial composition comprises only spore-forming bacteria. In some cases, the bacteria of the composition are in spore form.

[0167] Applicant has also discovered that certain bacterial species are associated with exacerbation or non-improvement of at least one sign or symptom of a disease or disorder associated with dysbiosis of the gastrointestinal microbiome (e.g., ulcerative colitis). The presence of such species in a bacterial composition can be undesirable. Accordingly, in some embodiments, a bacterial composition (e.g., designed compositions) does not include one or more of the following bacterial species: Eubacterium contortum, Clostridium hathewayi, Erysipelatoclostridum ramosum, Bifidobacterium dentium, Dialister invisus, Prevotella copri, Veillonella atypica, Veillonella dispar, Veillonella parvula, or Veillonella ratti. In certain embodiments, a bacterial composition does not include one or more bacteria that has at least about 97%, e.g., about 99% identity, to a 16S rDNA of the foregoing species. In some embodiments, a bacterial composition does not include at least one, two, three, four, five, six, seven, eight, nine, ten, eleven, or all of the species listed.

[0168] In some embodiments, a bacterial composition of the present disclosure does not comprise one or more bacteria comprising a 16S rDNA sequence that is at least about 85%, at least about 90%, at least about 95%, at least about 96%, at least about 97%, at least about 97.5%, at least 98%, at least about 98.5%, at least about 99%, at least about 99.5%, or about 100% identical to a 16S rDNA sequence set forth in SEQ ID NO: 15, 31, 37, 38, 40, 42, 43, 46, 52-58, 63, 69-71, and 83-101.

[0169] As described supra, Applicant has discovered that bacteria that are beneficial for the treatment of a disease or disorder associated with dysbiosis (e.g., ulcerative colitis) are associated with certain biological functions. Accordingly, in some embodiments, types of bacteria present in a bacterial composition disclosed herein (e.g., designed compositions) are associated with certain biological functions, which are useful in treating, preventing, delaying, or ameliorating one or more signs or symptoms associated with a disease or disorder disclosed herein (e.g., ulcerative colitis). Non-limiting examples of relevant functional features are further described below.

### Functional Features

[0170] In some embodiments of the invention, a microbiome composition disclosed herein (e.g., designed compositions) is a composition that includes bacteria that can carry out certain functions identified by applicant as being useful for treating and/or preventing a disease or disorder associated with dysbiosis (e.g., an IBD, such as UC). In certain embodiments, bacterial species that are useful for the present disclosure comprises one or more of the following features: (1) capable of engrafting (long-term and/or transient) when administered to a subject; (2) capable of having anti-inflammatory (e.g., inhibiting TNF-α-driven IL-8 secretion in epithelial cells in vitro, ability to downmodulate expression of inflammatory genes (e.g., CXCL1, CXCL2, CXCL3, CXCL11, ICAM1)); (3) not capable of inducing pro-inflammatory activity (e.g., does not induce L-8 production by IECs); (4) capable of producing secondary bile acids (e.g., 7α-dehydroxylase and bile salt hydrolase activity); (5) not capable of producing ursodeoxycholic acid (e.g., 7β-hydroxysteroid dehydrogenase activity); (6) capable of producing tryptophan metabolites (e.g., indole, 3-methyl indole, indolepropionic acid); (7) capable of producing medium-chain (valerate and hexanoate) and/or short-chain fatty acids (butyrate and propionate); (8) capable of inhibiting HDAC activity; (9) capable of restoring epithelial integrity, as determined by a primary epithelial cell monolayer barrier integrity assay; (10) capable of being associated with clinical remission of an inflammatory bowel disease; (11) capable of not being associated with clinical non-remission of an inflammatory bowel disease (12) capable of expressing catalase activity; (13) capable of having alpha-fucosidase activity; (14) capable of inducing Wnt activation; (15) capable of producing B vitamins (e.g., thiamin (B1) and pyridoxamine (B6)); (16) capable of modulating host metabolism of endocannabinoids; (17) capable of producing polyamines and/or modulating host metabolism of polyamines; 18) capable of reducing fecal levels of sphingolipids; (19) capable of modulating host production of kynurenine; (20) capable of reducing fecal calprotectin level; (21) not capable of activating a toll-like receptor pathway (e.g., TLR4 or TLR5); or (22) capable of activating a toll-like receptor pathway (e.g., TLR2). In certain embodiments, species that are useful for the present disclosure comprises one, two, three, four, five, six, seven, eight, nine, ten, eleven, twelve, thirteen, fourteen, fifteen, sixteen, seventeen, eighteen, nineteen, twenty, twenty-one, twenty-two, or all of the above features.

[0171] Additional disclosure relating to exemplary functional features are provided below.

### Engraftment

[0172] As described supra, a key feature of the bacterial compositions disclosed herein is the ability of one or more bacterial species (or OTUs of bacteria) included in the compositions to engraft in a subject when administered to the subject. Accordingly, Applicant has identified bacteria and combinations of bacteria that are capable of engrafting when administered to a subject. Not to be bound by any one theory, engraftment of bacteria and combinations of bacteria disclosed herein can repopulate the gastrointestinal microbiome of a subject. In some embodiments, once engrafted, bacteria and combinations of bacteria disclosed herein prevent (e.g., by outcompeting for growth nutrients) the growth of non-commensal microbes (e.g., pathogenic bacteria, such as Clostridium difficile) that may result in inflammatory responses in the host. In further embodiments, once engrafted, bacteria and combinations of bacteria disclosed herein can promote or augment the growth of other commensal bacteria within the subject. In further embodiments, the engrafting bacteria and combinations of bacteria can produce various factors (e.g., tryptophan metabolites, fatty acids, secondary bile acids) or exert other functions (e.g., those disclosed herein) to help treat and/or prevent one or more symptoms associated with a disease or disorder disclosed herein.

[0173] Whether bacteria or combinations of bacteria are capable of engrafting can be determined by various methods known in the art. Subject samples can first be collected (e.g., by whole stool samples, rectal swaps, tissue biopsies, or mucosal samples) before and/or after administration of bacteria or combinations of bacteria. Subsequently, these samples can be characterized to identify the bacteria or combinations of bacteria. Administered bacterial strains can be identified in samples based on genotypic, phenotypic, and other molecular properties of the strains, for example: a) the sequence of certain genes (e.g., 16S rRNA sequence) b) the presence and/or sequence identity of one or more regions of DNA (i.e., linear segments) that are rarely present in other strains, rarely present in other microbiome samples, rarely present in the target patient population, or absent from the microbiome of the particular subject(s) before administration of the bacteria, c) DNA variants including SNVs, insertions and deletions (i.e., indels), structural variation, gene copy number variation, or other DNA variants that are rarely present in other strains, rarely present in other microbiome samples, rarely present in the target patient population, or absent from the microbiome of the particular subject(s) before administration of the bacteria, d) other identifying phenotypic, genomic, proteomic, metabolomic or other properties of the administered strains. Molecular technologies used to identify administered bacteria or combinations of bacteria include but are not limited various DNA sequencing technologies including PCR and qPCR, amplicon sequencing, whole genome sequencing, shotgun metagenomic sequencing; other molecular technologies can be used included but not limited to microarray, nanostring and mass spectrometry. Bioinformatic methods used to analyze these data may include sequence alignment and mapping, genome or metagenome assembly, or other methods. Microbiological and culturing methods can also be used to identify and characterize strains. These mentioned methods of identification and characterization of administered bacteria or combinations of bacteria can be used alone or in combination.

[0174] In some embodiments, one or more of the bacterial species included in the bacterial compositions disclosed herein are capable of engrafting when administered to a subject. In certain embodiments, each of the bacterial species included in a bacterial composition is capable of engrafting. In some embodiments, the bacteria and combinations of bacteria that are capable of engrafting are long-term engrafters. In certain embodiments, the bacteria and combinations of bacteria that are capable of engrafting are transient engrafters. In some embodiments, the bacterial compositions disclosed herein (e.g., designed compositions) comprise one or more long-term engrafters and one or more transient engrafters. In certain embodiments, a bacterial composition disclosed herein comprises two, three, four, five, six, seven, eight, nine, ten or more long-term engrafters. In some embodiments, a bacterial composition comprises two, three, four, five, six, seven, eight, nine, ten or more transient engrafters. In further embodiments, a bacterial composition disclosed herein comprises three or more transient engrafters and/or seven or more long-term engrafters. Non-limiting examples of long-term engrafters and/or transient engrafters that can be used with the present disclosure are provided in Table 5.

### Bile Acids

[0175] Applicant has discovered that certain secondary bile acids are associated with the treatment and/or prevention of a disease or disorder, such as those associated with a dysbiosis (e.g., remission of UC). The term “bile acids” refers to a family of molecules, composed of a steroid structure with four rings, a five or eight carbon side-chain terminating in a carboxylic acid joined at the 17-position of the steroid scaffold, and the presence and orientation of different numbers of hydroxy groups. Depending on the tissue, the structure of the bile acids can vary. For instance, upon their synthesis in the liver, the bile acids are conjugated to either taurine or glycine residues (“conjugated primary bile acids” also known as bile salts) and subsequently excreted and stored in the gall bladder. During digestion, the conjugated primary bile acids are then secreted into the intestinal lumen. In some embodiments, the primary conjugated bile acids are glycocholic acid (gCA), taurocholic acid (tCA), glycochenodeoxycholic acid (gCDCA), or taurochenodeoxycholic acid (tCDCA).

[0176] Within the intestinal lumen, the resident intestinal bacteria express enzymes (e.g., bile salt hydrolase (BSH)), which deconjugate the conjugated primary bile acids to produce “primary bile acids.” In some embodiments, the primary bile acids comprise cholic acid (CA) or chenodeoxycholic acid (CDCA). Primary bile acids are then further processed (via enzymes, such as hydroxysteroid dehydrogenase (HSDH) or 7α-dehydroxylase) to become “secondary bile acids.” In some embodiments, the secondary bile acids comprise deoxycholic acid (DCA), (3 or 12)-oxo-deoxycholic acid, (3 or 12)-iso-deoxycholic acid, (3, 7 or 12)-oxo-cholic acid, (3, 7 or 12)-iso-cholic acid, lithocholic acid (LCA), oxo-LCA, iso-LCA, (3 or 7)-oxo-chenodeoxy cholic acid, or (3 or 7)-iso-chenodeoxy cholic acid.

[0177] The secondary bile acids produced in the intestinal lumen can circulate back to the liver, where they are reconjugated to become “conjugated secondary bile acids.” In some embodiments, the secondary conjugated bile acids of the present disclosure comprise (3 or 12)-glyco-iso-deoxycholic acid, (3 or 12)-tauro-iso-deoxycholic acid, glyco-deoxycholic acid, tauro-deoxycholic acid, (3, 7 or 12)-glyco-iso-cholic acid, (3, 7 or 12)-tauro-iso-cholic acid, sulfo-lithocholic acid, glyco-sulfo-lithocholic acid, tauro-sulfo-lithocholic acid, (3 or 7)-glyco-iso-chenodeoxycholic acid, (3 or 7)-tauro-iso-chenodeoxycholic acid, (3 or 7)-glyco-oxo-chenodeoxycholic acid, or (3 or 7)-tauro-oxo-chenodeoxycholic acid.

[0178] In some embodiments, one or more of the bacterial species that can be used in constructing the designed compositions disclosed herein comprise an enzyme involved in secondary bile acid production. In certain embodiments, the enzyme comprises BSH or HSDH. In some embodiments, a bacterial species useful for the present disclosure comprises both BSH and HSDH. Accordingly, in some embodiments, bacteria and combinations of bacteria disclosed herein can increase the level of a bile acid (e.g., a secondary bile acid, e.g., deoxycholic acid (DCA), 3-α-12-oxo-deoxycholic acid, 3-β-12-α-deoxycholic acid (3-isodeoxycholic acid), 7-α-3-oxo-chenodeoxycholic acid, lithocholic acid (LCA), 3-oxoLCA, oxo-LCA, iso-LCA, and combinations thereof) in a subject.

[0179] In some embodiments, the level of a secondary bile acid is increased by at least about 1%, at least about 5%, at least about 10%, at least about 15%, at least about 20%, at least about 25%, at least about 30%, at least about 35%, at least about 40%, at least about 45%, at least about 50%, at least about 55%, at least about 60%, at least about 65%, at least about 70%, at least about 75%, at least about 80%, at least about 85%, at least about 90%, at least about 95%, or at least about 100%, compared to a corresponding level in a reference sample. In some embodiments, the reference sample is a biological sample (e.g., fecal sample) obtained from a subject prior to the administration of a bacterial composition disclosed herein. In other embodiments, the reference sample is a biological sample (e.g., fecal sample) obtained from a subject with an active symptom of a disease or disorder, such as those associated with dysbiosis (e.g., ulcerative colitis flare-up).

[0180] In some embodiments, the increase in the level of a secondary bile acid can reduce the level of a pro-inflammatory mediators (e.g., TNF-α or IL-8) produced by activated cells (e.g., LPS-stimulated monocytes, LPS-stimulated PBMCs, or TNF-α-stimulated intestinal epithelial cells). In some embodiments, the increase in the level of a secondary bile acid can increase the level of anti-inflammatory mediators (e.g., IL-10) produced by activated cells. In some embodiments, the increase in the level of a secondary bile acid is correlated with an improvement of at least one aspect of the disease state (e.g., clinical remission or endoscopic/histologic response or reduced levels of fecal calprotectin).

[0181] In certain embodiments, the amount of pro-inflammatory mediators produced by activated cells is decreased by at least about 1%, at least about 5%, at least about 10%, at least about 15%, at least about 20%, at least about 25%, at least about 30%, at least about 35%, at least about 40%, at least about 45%, at least about 50%, at least about 55%, at least about 60%, at least about 65%, at least about 70%, at least about 75%, at least about 80%, at least about 85%, at least about 90%, at least about 95%, or at least about 100%, compared to a reference sample (e.g., activated cells not treated with increased concentration of a secondary bile acid). In some embodiments, the level of anti-inflammatory mediators produced is increased by at least about 1%, at least about 5%, at least about 10%, at least about 15%, at least about 20%, at least about 25%, at least about 30%, at least about 35%, at least about 40%, at least about 45%, at least about 50%, at least about 55%, at least about 60%, at least about 65%, at least about 70%, at least about 75%, at least about 80%, at least about 85%, at least about 90%, at least about 95%, or at least about 100% compared to a reference sample (e.g., activated cells not treated with increased concentration of a secondary bile acid).

[0182] In some embodiments, reducing the level of certain secondary bile acids can be important in the effective treatment of a disease or disorder disclosed herein. A non-limiting example of such a secondary bile acid is ursodeoxycholic acid. Accordingly, in certain embodiments, bacteria and combinations of bacteria that are useful for the present disclosure are capable of reducing the level of a secondary bile acid in a subject. In some embodiments, the level of a secondary bile acid is reduced by at least about 1%, at least about 5%, at least about 10%, at least about 15%, at least about 20%, at least about 25%, at least about 30%, at least about 35%, at least about 40%, at least about 45%, at least about 50%, at least about 55%, at least about 60%, at least about 65%, at least about 70%, at least about 75%, at least about 80%, at least about 85%, at least about 90%, at least about 95%, or at least about 100%, compared to a corresponding level in a reference sample. In some embodiments, the reference sample is a biological sample (e.g., fecal sample) obtained from a subject prior to the administration of a bacterial composition disclosed herein. In other embodiments, the reference sample is a biological sample (e.g., fecal sample) obtained from a subject with an active symptom of a disease or disorder, such as those associated with dysbiosis (e.g., ulcerative colitis flare-up).

### Anti-Inflammatory Activity

[0183] Applicant has identified bacteria and combinations of bacteria that are capable of exhibiting anti-inflammatory activity when administered to a subject. As used herein, the term “anti-inflammatory activity” refers to the ability to prevent and/or reduce inflammation The term “inflammation” or “pro-inflammatory” refers to the complex biological response of an individual's immune system to harmful stimuli, such as pathogens, damaged cells, or irritants, and includes secretion of pro-inflammatory mediators, such as pro-inflammatory cytokines, i.e., cytokines which are produced predominantly by activated immune cells, such as macrophages and dendritic cells, and are involved in the amplification of inflammatory reactions.

[0184] Without being limited to any one particular theory, the anti-inflammatory activity observed with the bacteria and combinations of bacteria disclosed herein can be related to the other functional aspects of the bacteria or combinations of bacteria. For example, in some embodiments, the anti-inflammatory activity is related to the ability of the bacteria or combinations of bacteria to produce a secondary bile acid, a tryptophan metabolite, a short-chain fatty acid, inhibit HDAC inhibition, and/or inhibit TNF-α-driven IL-8 secretion in epithelial cells in vitro. Accordingly, in some embodiments, the bacteria and combinations of bacteria that have anti-inflammatory activity have one or more of the following features: (i) capable of producing a short-chain fatty acid, (ii) capable of inhibiting histone deacetylase (HDAC) activity, (iii) capable of inhibiting TNF-α-driven IL-8 secretion in epithelial cells in vitro, or (iv) capable of inhibiting NF-kB and NF-kB target genes (v) any combination thereof. Whether bacteria or combinations of bacteria have anti-inflammatory activity can be measured using assays known in the art, including methods to measure metabolites like short-chain fatty acids (e.g., MS, LC-MS, GS-MS, LC-MS/MS), methods of measuring gene expression at the RNA and/or protein level (e.g., Luminex bead-based cytokine panels, microarray, nanostring, and RNA-sequencing).

[0185] In some embodiments, the anti-inflammatory activity of the bacteria and combinations of bacteria disclosed herein can reduce the amount of pro-inflammatory mediators produced and/or present in a subject (e.g., suffering from a disease or disorder disclosed herein). In certain embodiments, the amount of pro-inflammatory mediators produced and/or present in the subject is decreased by at least about 1%, at least about 5%, at least about 10%, at least about 15%, at least about 20%, at least about 25%, at least about 30%, at least about 35%, at least about 40%, at least about 45%, at least about 50%, at least about 55%, at least about 60%, at least about 65%, at least about 70%, at least about 75%, at least about 80%, at least about 85%, at least about 90%, at least about 95%, or at least about 100%, compared to a reference sample. In some embodiments, the reference sample is a biological sample obtained from a subject prior to the administration of a bacterial composition disclosed herein. In other embodiments, the reference sample is a biological sample obtained from a subject with an active symptom of a disease or disorder, such as those associated with dysbiosis (e.g., ulcerative colitis flare-up).

[0186] In some embodiments, the anti-inflammatory activity of the bacteria and combinations of bacteria disclosed herein can increase the amount of anti-inflammatory mediators in a subject. Non-limiting examples of anti-inflammatory mediators include, but are not limited to, IL-1 receptor antagonists (IL-1RA), IL-4, IL-6, IL-10, IL-11, IL-13, TGF-β, and combinations thereof. In certain embodiments, the bacteria and combinations of bacteria that are capable of exhibiting anti-inflammatory activity can increase the amount of anti-inflammatory mediators in a subject by at least about 1%, at least about 5%, at least about 10%, at least about 15%, at least about 20%, at least about 25%, at least about 30%, at least about 35%, at least about 40%, at least about 45%, at least about 50%, at least about 55%, at least about 60%, at least about 65%, at least about 70%, at least about 75%, at least about 80%, at least about 85%, at least about 90%, at least about 95%, or at least about 100%, compared to a reference sample. In some embodiments, the reference sample is a biological sample obtained from a subject prior to the administration of a bacterial composition disclosed herein. In other embodiments, the reference sample is a biological sample obtained from a subject with an active symptom of a disease or disorder, such as those associated with dysbiosis (e.g., ulcerative colitis flare-up).

### Tryptophan Metabolism and Aryl Hydrocarbon Receptor

[0187] As used herein, the term “tryptophan” refers to the essential amino acid tryptophan, which is an α-amino acid and has a chemical formula of C₁₁H₁₂N₂O₂. Besides its use in protein synthesis, tryptophan is important in a number of pathways leading to the production of, for example, serotonin (5-hydroxytryptamine), melatonin, kynurenines, and tryptamine. Tryptophan and its metabolites can affect, for example, immunosuppression, immune function, cancer, inflammatory disease, epithelial barrier function, and infection.

[0188] Certain tryptophan pathway products have been shown to function as aryl hydrocarbon receptor (Ahr) agonists. The metabolites include, for example, indole, indole-3 aldehyde, indole-3 acetate, indole-3 propionic acid, indole, 3-methylindole, indole-3 acetaldehyde, indole-3 acetonitrile, 6-formylindolo[3,2-b]carbazole (FICZ), and tryptamine. Ahr plays a role in controlling the differentiation and activity of specific T cell subpopulations. It reportedly can influence adaptive immune responses through its effects on both T cells and antigen presenting cells (APCs). Ahr is thought to be involved in development and maintenance of CD4+T regulatory cells (Tregs) as well as FoxP3-IL-10+CD4+Tr1, and induction of Th17 cells. Ahr also alters cytokine expression by Type 3 innate lymphoid cells (ILC3s). These cellular effects include increased production of IL-22. AhR induction by Trp metabolites has been reported to enhance epithelial barrier integrity and ameliorate colitis in in vivo models.

[0189] In some embodiments, bacteria or combination of bacteria disclosed herein can increase the level of a tryptophan metabolite in a subject. In some embodiments, tryptophan metabolite comprises indole, 3-methyl indole, indoleacrylate, or any combination thereof. In certain embodiments, bacteria or combination of bacteria disclosed herein can increase the level of indole and/or 3-methylindole in the subject.

[0190] In some embodiments, the level of a tryptophan metabolite is increased by at least about 1%, at least about 5%, at least about 10%, at least about 15%, at least about 20%, at least about 25%, at least about 30%, at least about 35%, at least about 40%, at least about 45%, at least about 50%, at least about 55%, at least about 60%, at least about 65%, at least about 70%, at least about 75%, at least about 80%, at least about 85%, at least about 90%, at least about 95%, or at least about 100%, compared to a corresponding level in a reference sample. In some embodiments, the reference sample is a biological sample (e.g., fecal sample) obtained from a subject prior to the administration of a bacterial composition disclosed herein. In other embodiments, the reference sample is a biological sample (e.g., fecal sample) obtained from a subject with an active symptom of a disease or disorder, such as those associated with dysbiosis (e.g., ulcerative colitis flare-up).

[0191] In some embodiments, bacteria or combination of bacteria disclosed herein can increase the level of AhR-mediated Cyp1a1 expression in a subject. In some embodiments, the level of AhR-mediated Cyp1a1 expression is increased by at least about 1%, at least about 5%, at least about 10%, at least about 15%, at least about 20%, at least about 25%, at least about 30%, at least about 35%, at least about 40%, at least about 45%, at least about 50%, at least about 55%, at least about 60%, at least about 65%, at least about 70%, at least about 75%, at least about 80%, at least about 85%, at least about 90%, at least about 95%, or at least about 100%, compared to a corresponding level in a reference sample. In some embodiments, the reference sample is a biological sample (e.g., fecal sample) obtained from a subject prior to the administration of a bacterial composition disclosed herein. In other embodiments, the reference sample is a biological sample (e.g., fecal sample) obtained from a subject with an active symptom of a disease or disorder, such as those associated with dysbiosis (e.g., ulcerative colitis flare-up).

[0192] Without being limited to a specific mechanism, in some embodiments, bacteria disclosed herein increase the level of AhR-mediated Cyp1a1 expression through an increase in tryptophan metabolite production. In some embodiments, increase in a tryptophan metabolite (e.g., indole or 3-methylindole) level is correlated with improvement of a disease or disorder disclosed herein (e.g., clinical remission). Accordingly, in some embodiments, increase in the level of AhR-mediated Cyp1a1 expression is correlated with one or more features associated with an improvement in a subject's condition, e.g., a subject diagnosed with a disease or disorder, such as those associated with dysbiosis (e.g., an IBD, such as ulcerative colitis).

[0193] In some embodiments, reducing the level of a tryptophan metabolite in a subject might be useful in treating a disease or disorder. Accordingly, in certain embodiments, bacteria and combinations of bacteria disclosed herein are capable of reducing the level of a tryptophan metabolite in a subject. In some embodiments, the level of a tryptophan metabolite is reduced by at least about 1%, at least about 5%, at least about 10%, at least about 15%, at least about 20%, at least about 25%, at least about 30%, at least about 35%, at least about 40%, at least about 45%, at least about 50%, at least about 55%, at least about 60%, at least about 65%, at least about 70%, at least about 75%, at least about 80%, at least about 85%, at least about 90%, at least about 95%, or at least about 100%, compared to a corresponding level in a reference sample. In some embodiments, the reference sample is a biological sample (e.g., fecal sample) obtained from a subject prior to the administration of a bacterial composition disclosed herein. In other embodiments, the reference sample is a biological sample (e.g., fecal sample) obtained from a subject with an active symptom of a disease or disorder, such as those associated with dysbiosis.

### Fatty Acids

[0194] Applicant has identified bacteria and combinations of bacteria that are capable of producing certain fatty acids in a subject. In some embodiments, fatty acids comprise short-chain fatty acids. In other embodiments, fatty acids comprise medium-chain fatty acids. As used herein, the term “short-chain fatty acids” refer to fatty acids with less than six carbon atoms. Non-limiting examples of short-chain fatty acids include formate, acetate, propionate, butyrate, isobutryate, valerate, isovalerate, and combinations thereof. In certain embodiments, short-chain fatty acid comprises acetate, propionate, butyrate, or combinations thereof. As used herein, the term “medium-chain fatty acids” refer to fatty acids with aliphatic tails of 6 to 12 carbon atoms, which can form medium-chain triglycerides. Non-limiting examples of middle-chain fatty acids include hexanoate, oxtanoate, decanoate, dodecanoate, and combinations thereof. In some embodiments, middle-chain fatty acid comprises hexanoate.

[0195] In some embodiments, bacteria or combination of bacteria disclosed herein increases the level of a short-chain fatty acid in a subject. In certain embodiments, short-chain fatty acid comprises formate, acetate, propionate, butyrate, isobutryate, valerate, isovalerate, or any combination thereof. In some embodiments, the short-chain fatty acid comprises propionate, butyrate, acetate, or combinations thereof. In some embodiments, the level of a short-chain fatty acid in the subject is increased by at least about 1%, at least about 5%, at least about 10%, at least about 15%, at least about 20%, at least about 25%, at least about 30%, at least about 35%, at least about 40%, at least about 45%, at least about 50%, at least about 55%, at least about 60%, at least about 65%, at least about 70%, at least about 75%, at least about 80%, at least about 85%, at least about 90%, at least about 95%, or at least about 100%, compared to a corresponding level in a reference sample. In some embodiments, the reference sample is a biological sample (e.g., fecal sample) obtained from a subject prior to the administration of a bacterial composition disclosed herein. In other embodiments, the reference sample is a biological sample (e.g., fecal sample) obtained from a subject with an active symptom of a disease or disorder, such as those associated with dysbiosis (e.g., ulcerative colitis flare-up).

[0196] In some embodiments, bacteria or combination of bacteria disclosed herein increases the level of a middle-chain fatty acid in a subject. In certain embodiments, the middle-chain fatty acid comprises hexanoate. In some embodiments, the level of a middle-chain fatty acid in the subject is increased by at least about 1%, at least about 5%, at least about 10%, at least about 15%, at least about 20%, at least about 25%, at least about 30%, at least about 35%, at least about 40%, at least about 45%, at least about 50%, at least about 55%, at least about 60%, at least about 65%, at least about 70%, at least about 75%, at least about 80%, at least about 85%, at least about 90%, at least about 95%, or at least about 100%, compared to a corresponding level in a reference sample. In some embodiments, the reference sample is a biological sample (e.g., fecal sample) obtained from a subject prior to the administration of a bacterial composition disclosed herein. In other embodiments, the reference sample is a biological sample (e.g., fecal sample) obtained from a subject with an active symptom of a disease or disorder, such as those associated with dysbiosis (e.g., ulcerative colitis flare-up).

### Inhibition of Histone Deacetylase (HDAC) Activity

[0197] Histone deacetylases (HDACs) are a family of enzymes that can remove acetyl residues from specific sites in the N-terminal end of histones, which are part of the DNA chromatin structure in eukaryotic cells. The steady state of histone acetylation is a result of the balance of acetylation by histone acetyltransferase (HAT) enzymes and deacetylation by HDACs. When HDACs are inhibited but HATs activity continues, histones become hyperacetylated, thus disrupting high order chromatin structure and stimulating transcription by RNA polymerase III. The effect of HDAC inhibition in gene expression is not generalized, as only 2% of mammalian genes are affected by HDAC inhibition.

[0198] Some short chain fatty acids (SCFAs) produced by the intestinal human microbiome are HDAC inhibitors. Butyrate in particular has been identified as an HDAC inhibitor in vitro and in vivo, leading to the accumulation of hyperacetylated histones H3 and H4 (Candido et al., 1978 Cell 14:105-113; Boffa et al. 1978 J Biol Chem 253:3364-3366; Vidali et al. 1978 Proc Nat Acad Sci USA 75:2239-2243; Davie. 2003 J Nutrition 133:2485S-2493S). Other SCFAs, such as propionate, isobutyrate, isovalerate, valerate, lactate, and acetate, can also inhibit histone deacetylation, although reportedly less effectively than butyrate (Sealy and Chalkley. 1978 Cell 14:115-121; Latham et al. Nucl Acids Res 40:4794-4803, Waldecker et al. 2008 J Nutr Biochem 19:587-593). Certain therapeutic effects of butyrate are reportedly mediated, at least in part, by inhibition of HDACs.

[0199] In some embodiments, bacteria and combinations of bacteria disclosed herein are capable of inhibiting (or reducing) HDAC activity. In some embodiments, bacteria and combinations of bacteria disclosed herein can inhibit (or reduce) HDAC activity in a subject by at least about 1%, at least about 5%, at least about 10%, at least about 15%, at least about 20%, at least about 25%, at least about 30%, at least about 35%, at least about 40%, at least about 45%, at least about 50%, at least about 55%, at least about 60%, at least about 65%, at least about 70%, at least about 75%, at least about 80%, at least about 85%, at least about 90%, at least about 95%, or at least about 100%, compared to a reference sample. In some embodiments, the reference sample is a biological sample obtained from a subject prior to the administration of a bacterial composition disclosed herein. In other embodiments, the reference sample is a biological sample obtained from a subject with an active symptom of a disease or disorder, such as those associated with dysbiosis (e.g., ulcerative colitis flare-up).

[0200] In some embodiments, the bacteria disclosed herein that are capable of inhibiting HDAC activity can be further grouped into one of seven phenotypic clusters (represented as 0-6 in FIG. 13; termed herein “HDAC clusters”) based on their ability to inhibit HDAC activity when grown in different nutrient sources. Non-limiting examples of nutrient sources that can be used include, but are not limited to, peptone/yeast extract medium (PY) alone or supplemented with 0.5% of one of seven C sources (glucose, fucose, sucrose, starch, pectin, FOS/inulin, or mucin). As used herein, “HDAC cluster 0” corresponds to strains that are capable of inhibiting HDAC when grown on fucose (a sugar found as a component of mucin glycoproteins) but not on other substrates. These strains can utilize fucose as a substrate for propionate production, but not amino acids present in the basal media or other simple and complex carbohydrates added in other conditions. “HDAC cluster 1” corresponds to strains that are not capable of inhibiting HDAC when grown in any of the nutrient sources disclosed herein. “HDAC cluster 2” corresponds to strains that are capable of inhibiting HDAC and have reduced inhibition when grown in the presence of sucrose, inulin, glucose, or pectin. “HDAC cluster 3” corresponds to strains that are capable of inhibiting HDAC and have reduced inhibition when grown in the presence of sucrose, inulin, glucose, or pectin. Strains belonging to HDAC cluster 3 are capable of having increased inhibition of HDAC when grown in the presence of mucin. “HDAC cluster 4” corresponds to strains that are capable of inhibiting HDAC in all conditions disclosed herein. Moreover, the addition of sugars, polysaccharides, or mucin does not increase or decrease the HDAC inhibition activity of these strains. “HDAC cluster 5” corresponds to strains that are capable of inhibiting HDAC when grown only in the presence of sucrose, FOS/inulin, glucose, pectin, or starch. “HDAC cluster 6” corresponds to strains that are capable of increasing HDAC inhibition when grown in the presence of sucrose, FOS/inulin, glucose, pectin, or mucin.

### Other Functional Features

[0201] As described supra, in addition to the specific functions detailed above, in some embodiments, bacteria or combinations of bacteria disclosed herein can further comprise one or more of the following functional features: (i) capable of inducing Wnt activation, (ii) capable of producing B vitamins (e.g., thiamin (B1) and pyridoxamine (B6)), (iii) capable of modulating host metabolism of endocannabinoids, (iv) capable of producing polyamines and/or modulating host metabolism of polyamines, (v) capable of reducing fecal levels of sphingolipids, (vi) capable of modulating host production of kynurenine, (vii) capable of reducing fecal calprotectin level, or (viii) any combination thereof. In further embodiments, bacteria or combinations of bacteria disclosed herein are not capable of activating a toll-like receptor pathway (e.g., TLR4 or TLR5). In certain embodiments, bacteria or combinations of bacteria disclosed herein are capable of activating a toll-like receptor pathway (e.g., TLR4 or TLR5).

[0202] The levels of any of the biological molecules (e.g., those described above) in a subject suffering from a disease or disorder disclosed herein (can be measured as described in the present disclosure (see, e.g., Examples) or by any other methods known in the art.

[0203] In some embodiments, a bacterial composition of the present disclosure (e.g., designed compositions) comprises one or more bacteria that are capable of forming spores (i.e., spore-forming bacteria). Accordingly, in some embodiments, a bacterial composition comprises a purified population of bacteria, wherein the bacteria are in the form of spores. In some embodiments, all the bacteria are in the form of spores. In other embodiments, some of the bacteria are in the form of spores, while other bacteria are not in the form of spores (i.e., vegetative-state). In some embodiments, the bacterial composition comprises a purified population of spore-forming bacteria, wherein the bacteria are all in the vegetative-state.

[0204] In some embodiments, a bacterial composition comprises a population of bacteria that are sensitive to one or more antibiotics that can be used in a human. In some embodiments, bacteria of the composition are resistant to one or more antibiotics that are used to prophylactically treat patients with a disease or disorder, such as those associated with dysbiosis of the gastrointestinal tract (e.g., an active IBD (e.g., flare of Crohn's disease)). Such antibiotics include, but are not limited to, β-lactams, vancomycin, aminoglycosides, fluoroquinolones, and daptomycin.

[0205] In some embodiments, the strain of an OTU useful for the present disclosure (e.g., an OTU disclosed herein) can be obtained from a public biological resource center such as the ATCC (atcc.org), the DSMZ (dsmz.de), or the Riken BioResource Center (en.brc.riken.jp). Methods for determining sequence identity are known in the art.

[0206] In some embodiments, the composition is a designed composition. DE1 is an example of such a designed composition. Non-limiting examples of additional designed compositions are provided in FIGS. 30, 31, and 32. As used herein, the term “DE1” refers to a synthetic composition consisting of 14 spore-forming bacterial species. See FIG. 30. DE1 (as well as the other exemplary DEs disclosed herein) was designed to capture key functional and phylogenetic attributes that applicant identified as associated with clinical remission (e.g., of a disease or disorder disclosed herein) and/or shown to have properties reflecting anti-inflammatory activity and/or enhancement of epithelial barrier integrity. Accordingly, DE1 integrates clinical insights of functional and phylogenetic correlates of clinical remission together with in vitro screening data on strain functional phenotypes. Specifically, DE1 was designed to provide a bacterial composition with the following functional attributes: a) tryptophan metabolic capacity, specifically the ability to produce indole and 3-methylindole, b) HDAC inhibition capacity across diverse nutrient conditions (e.g. the ability to produce SCFAs), c) the ability to produce medium-chain fatty acids, specifically valerate and hexanoate, d) production of deoxycholic acid (DCA) and lithocholic acid (LCA) from cholate and chenodeoxycholate, e) the ability to suppress induction of IL-8 in intestinal epithelial cells, f) the ability to induce regulatory T cells, and g) the ability to activate Wnt signaling pathway. While ensuring these functional properties are present in DE1, phylogenetic diversity and coverage of phylogenetic clades associated with remission of UC in FMT studies were represented.

### II. Formulations

[0207] Further provided herein are formulations for administration to humans and other subjects in need thereof (e.g., subject suffering from a disease or disorder disclosed herein). Generally, a bacterial composition as described herein is combined with additional active and/or inactive materials to produce a formulation. In some embodiments, a bacterial composition is formulated in a unit dosage form, each dosage form containing, e.g., from about 10² to about 10⁹ spores, for example, about 10⁴ to about 10⁸ spores. In other embodiments, a bacterial composition is formulated in a multi-dose format. The formulation disclosed herein can be effective over a wide dosage range and is generally administered in a pharmaceutically effective amount.

[0208] The term “effective dose” or “effective dosage” is defined as an amount sufficient to achieve or at least partially achieve a desired effect. A “therapeutically effective amount” or “therapeutically effective dosage” of a drug or therapeutic agent is any amount of the drug that, when used alone or in combination with another therapeutic agent, promotes disease regression evidenced by a decrease in severity of disease symptoms, an increase in frequency and duration of disease symptom-free periods, or a prevention of impairment or disability due to the disease affliction. A therapeutically effective amount or dosage of a drug includes a “prophylactically effective amount” or a “prophylactically effective dosage”, which is any amount of the drug that, when administered alone or in combination with another therapeutic agent to a subject at risk of developing a disease or of suffering a recurrence of disease, inhibits the development or recurrence of the disease. The ability of a therapeutic agent to promote disease regression or inhibit the development or recurrence of the disease can be evaluated using a variety of methods known to the skilled practitioner, such as in human subjects during clinical trials, in animal model systems predictive of efficacy in humans, or by assaying the activity of the agent in in vitro assays.

[0209] As used herein, the term “dosage” can refer to the total number of colony forming units (CFUs) of each individual species or strain; or can refer to the total number of microorganisms in the dose. It is understood in the art that determining the number of organisms in a dosage is not exact and can depend on the method used to determine the number of organisms present. If the composition includes spores, for example, the number of spores in a composition can be determined using a dipicolinic acid assay (Fichtel et al., FEMS Microbiol Ecol 61: 522-532 (2007)). Effective doses can be extrapolated from dose-response curves derived from in vitro or animal model test systems.

[0210] As used herein, the term “unit dosage forms” refers to physically discrete units suitable as unitary dosages for human subjects and other mammals, each unit containing a predetermined quantity of active component calculated to produce the desired therapeutic effect, in association with a suitable pharmaceutical excipient. In some cases, more than one unit dosage form constitutes a dose. For example, a single dose can be one unit dosage form, two dosage unit forms, three dosage unit forms, four unit dosage forms, five unit dosage forms, or more. In some cases, the number of unit dosage forms constituting a single dose is 1, 2, 3, 4, 5, 6, 7, 8, 9, 10, 11, 12, 13, 14, 15, 20, 25, or 30 unit dosage forms. A single dose can be, e.g., about 103 to about 10⁹ spores, for example, about 10⁴ to about 10⁸ spores. In some embodiments, a dose is 1, 2, 3, or 4 capsules containing a total of between about 10² and about 10⁸ spores in the dose. In the case of a single dose having multiple dosage forms, the dosage forms are generally delivered within a prescribed period, e.g., within 1 hour, 2 hours, 5 hours, 10 hours, 15 hours, or 24 hours.

[0211] In some embodiments, a bacterial composition comprises at least one carbohydrate. A “carbohydrate” refers to a sugar or polymer of sugars. The terms “saccharide,” “polysaccharide,” “carbohydrate,” and “oligosaccharide” can be used interchangeably. Most carbohydrates are aldehydes or ketones with many hydroxyl groups, usually one on each carbon atom of the molecule. Carbohydrates generally have the molecular formula CₙH₂ₙOₙ. A carbohydrate can be a monosaccharide, a disaccharide, trisaccharide, oligosaccharide, or polysaccharide. The most basic carbohydrate is a monosaccharide, such as glucose, sucrose, galactose, mannose, ribose, arabinose, xylose, and fructose. Disaccharides are two joined monosaccharides. Exemplary disaccharides include sucrose, maltose, cellobiose, and lactose. Typically, an oligosaccharide includes between three and six monosaccharide units (e.g., raffinose, stachyose), and polysaccharides include six or more monosaccharide units. Exemplary polysaccharides include starch, glycogen, and cellulose. Carbohydrates can contain modified saccharide units such as 2′-deoxyribose wherein a hydroxyl group is removed, 2′-fluororibose wherein a hydroxyl group is replaced with a fluorine, or N-acetylglucosamine, a nitrogen-containing form of glucose (e.g., 2′-fluororibose, deoxyribose, and hexose). Carbohydrates can exist in many different forms, for example, conformers, cyclic forms, acyclic forms, stereoisomers, tautomers, anomers, and isomers.

[0212] In some embodiments, a bacterial composition comprises at least one lipid. As used herein a “lipid” includes fats, oils, triglycerides, cholesterol, phospholipids, fatty acids in any form including free fatty acids. Fats, oils and fatty acids can be saturated, unsaturated (cis or trans) or partially unsaturated (cis or trans). In some embodiments the lipid comprises at least one fatty acid selected from lauric acid (12:0), myristic acid (14:0), palmitic acid (16:0), palmitoleic acid (16:1), margaric acid (17:0), heptadecenoic acid (17:1), stearic acid (18:0), oleic acid (18:1), linoleic acid (18:2), linolenic acid (18:3), octadecatetraenoic acid (18:4), arachidic acid (20:0), eicosenoic acid (20:1), eicosadienoic acid (20:2), eicosatetraenoic acid (20:4), eicosapentaenoic acid (20:5) (EPA), docosanoic acid (22:0), docosenoic acid (22:1), docosapentaenoic acid (22:5), docosahexaenoic acid (22:6) (DHA), and tetracosanoic acid (24:0). In some embodiments, the composition comprises at least one modified lipid, for example a lipid that has been modified by cooking.

[0213] In some embodiments, a bacterial composition comprises at least one supplemental mineral or mineral source. Examples of minerals include, without limitation: chloride, sodium, calcium, iron, chromium, copper, iodine, zinc, magnesium, manganese, molybdenum, phosphorus, potassium, and selenium. Suitable forms of any of the foregoing minerals include soluble mineral salts, slightly soluble mineral salts, insoluble mineral salts, chelated minerals, mineral complexes, non-reactive minerals such as carbonyl minerals, and reduced minerals, and combinations thereof.

[0214] In some embodiments, a bacterial composition comprises at least one supplemental vitamin. The at least one vitamin can be fat-soluble or water-soluble vitamins. Suitable vitamins include but are not limited to vitamin C, vitamin A, vitamin E, vitamin B12, vitamin K, riboflavin, niacin, vitamin D, vitamin B6, folic acid, pyridoxine, thiamine, pantothenic acid, and biotin. Suitable forms of any of the foregoing are salts of the vitamin, derivatives of the vitamin, compounds having the same or similar activity of the vitamin, and metabolites of the vitamin.

[0215] In some embodiments, a bacterial composition comprises an excipient. Non-limiting examples of suitable excipients include a buffering agent, a diluent, a preservative, a stabilizer, a binder, a compaction agent, a lubricant, a dispersion enhancer, a disintegration agent, a flavoring agent, a sweetener, and a coloring agent.

[0216] In some embodiments, the excipient is a buffering agent. Non-limiting examples of suitable buffering agents include sodium citrate, magnesium carbonate, magnesium bicarbonate, calcium carbonate, and calcium bicarbonate.

[0217] In some embodiments, the excipient serves as a diluent. In such embodiments, the excipient can be a solid, semi-solid, or liquid material that acts as a vehicle, carrier, or medium for the active component (e.g., bacteria of the composition disclosed herein). Thus, a formulation can be in the form of, e.g., a tablet, pill, powder, lozenge, sachet, cachet, elixir, suspension, emulsion, solution, syrup, aerosol (as a solid or in a liquid medium), ointment containing, for example, up to 10% by weight of the active component, soft capsule, hard capsule, gel-cap, tablet, suppository, solution, or packaged powder. In some cases, maximizing delivery of viable bacteria is enhanced by including gastro-resistant polymers, adhesion enhancers, or controlled release enhancers in a formulation.

[0218] In some embodiments, the excipient comprises a preservative. Non-limiting examples of suitable preservatives include antioxidants, such as alpha-tocopherol and ascorbate, and antimicrobials, such as parabens, chlorobutanol, and phenol.

[0219] In some embodiments, a bacterial composition comprises a binder as an excipient. Non-limiting examples of suitable binders include starches, pregelatinized starches, gelatin, polyvinylpyrolidone, cellulose, methylcellulose, sodium carboxymethylcellulose, ethylcellulose, polyacrylamides, polyvinyloxoazolidone, polyvinylalcohols, C12-C18 fatty acid alcohol, polyethylene glycol, polyols, saccharides, oligosaccharides, and combinations thereof.

[0220] In some embodiments, a bacterial composition comprises a lubricant as an excipient. Non-limiting examples of suitable lubricants include magnesium stearate, calcium stearate, zinc stearate, hydrogenated vegetable oils, sterotex, polyoxyethylene monostearate, talc, polyethyleneglycol, sodium benzoate, sodium lauryl sulfate, magnesium lauryl sulfate, and light mineral oil.

[0221] In some embodiments, a bacterial composition comprises a dispersion enhancer as an excipient. Non-limiting examples of suitable dispersants include starch, alginic acid, polyvinylpyrrolidones, guar gum, kaolin, bentonite, purified wood cellulose, sodium starch glycolate, isoamorphous silicate, and microcrystalline cellulose as high HLB emulsifier surfactants.

[0222] In some embodiments, a bacterial composition comprises a disintegrant as an excipient. In some embodiments, the disintegrant is a non-effervescent disintegrant. Non-limiting examples of suitable non-effervescent disintegrants include starches such as corn starch, potato starch, pregelatinized and modified starches thereof, sweeteners, clays, such as bentonite, micro-crystalline cellulose, alginates, sodium starch glycolate, gums such as agar, guar, locust bean, karaya, pectin, and tragacanth. In some embodiments, the disintegrant is an effervescent disintegrant. Non-limiting examples of suitable effervescent disintegrants include sodium bicarbonate in combination with citric acid, and sodium bicarbonate in combination with tartaric acid.

[0223] In some embodiments, the excipient comprises a flavoring agent. Flavoring agents can be chosen from synthetic flavor oils and flavoring aromatics; natural oils; extracts from plants, leaves, flowers, and fruits; and combinations thereof. In some embodiments, the flavoring agent is selected from cinnamon oils; oil of wintergreen; peppermint oils; clover oil; hay oil; anise oil; eucalyptus; vanilla; citrus oil such as lemon oil, orange oil, grape and grapefruit oil; and fruit essences including apple, peach, pear, strawberry, raspberry, cherry, plum, pineapple, and apricot.

[0224] In some embodiments, the excipient comprises a sweetener. Non-limiting examples of suitable sweeteners include glucose (corn syrup), dextrose, invert sugar, fructose, and mixtures thereof (when not used as a carrier); saccharin and its various salts such as the sodium salt; dipeptide sweeteners such as aspartame; dihydrochalcone compounds, glycyrrhizin; Stevia Rebaudiana (Stevioside); chloro derivatives of sucrose such as sucralose; and sugar alcohols such as sorbitol, mannitol, sylitol, and the like. Also contemplated are hydrogenated starch hydrolysates and the synthetic sweetener 3,6-dihydro-6-methyl-1,2,3-oxathiazin-4-one-2,2-dioxide, particularly the potassium salt (acesulfame-K), and sodium and calcium salts thereof.

[0225] In some embodiments, a bacterial composition comprises a coloring agent. Non-limiting examples of suitable color agents include food, drug and cosmetic colors (FD&C), drug and cosmetic colors (D&C), and external drug and cosmetic colors (Ext. D&C). The coloring agents can be used as dyes or their corresponding lakes.

[0226] Additional suitable excipients include, for example, saline, phosphate buffered saline (PBS), cocoa butter, polyethylene glycol, polyalcohols (e.g., glycerol, sorbitol, or mannitol) and prebiotic oligosaccharides such as inulin, Crystalean® starch, or dextrin. Excipients can also be selected to account, at least in part, for the ability of the OTUs in a particular composition to withstand gastric pH (if being delivered orally or directly to the GI tract) and/or bile acids, or other conditions encountered by the formulation upon delivery to a subject (e.g., an ulcerative colitis patient).

[0227] The weight fraction of the excipient or combination of excipients in the formulation is usually about 99% or less, such as about 95% or less, about 90% or less, about 85% or less, about 80% or less, about 75% or less, about 70% or less, about 65% or less, about 60% or less, about 55% or less, 50% or less, about 45% or less, about 40% or less, about 35% or less, about 30% or less, about 25% or less, about 20% or less, about 15% or less, about 10% or less, about 5% or less, about 2% or less, or about 1% or less of the total weight of the composition.

[0228] In preparing a formulation of the present disclosure, the bacterial composition can be milled to provide the appropriate particle size prior to combining with the other ingredients, e.g., those described herein. In some embodiments, a bacterial composition is formulated so as to provide quick, sustained, or delayed release of the active component after administration to a subject, for example, for release in the colon, by employing methods and forms known in the art.

[0229] The bacterial compositions disclosed herein can be formulated into a variety of forms and administered by a number of different means. A bacterial composition can be administered orally, rectally, or parenterally, in formulations containing conventionally acceptable carriers, adjuvants, and vehicles as desired. The term “parenteral” as used herein includes subcutaneous, intravenous, intramuscular, or intrasternal injection and infusion techniques. In an exemplary embodiment, the bacterial composition is administered orally.

[0230] Solid dosage forms for oral administration include capsules, tablets, caplets, pills, troches, lozenges, powders, and granules. A capsule typically comprises a core material comprising a bacterial composition and a shell wall that encapsulates the core material. In some embodiments the core material comprises at least one of a solid, a liquid, and an emulsion. In some embodiments the shell wall material comprises at least one of a soft gelatin, a hard gelatin, and a polymer. Suitable polymers include, but are not limited to: cellulosic polymers such as hydroxypropyl cellulose, hydroxyethyl cellulose, hydroxypropyl methyl cellulose (HPMC), methyl cellulose, ethyl cellulose, cellulose acetate, cellulose acetate phthalate, cellulose acetate trimellitate, hydroxypropylmethyl cellulose phthalate, hydroxypropylmethyl cellulose succinate and carboxymethylcellulose sodium; acrylic acid polymers and copolymers, such as those formed from acrylic acid, methacrylic acid, methyl acrylate, ammonio methylacrylate, ethyl acrylate, methyl methacrylate and/or ethyl methacrylate (e.g., those copolymers sold under the trade name “Eudragit”); vinyl polymers and copolymers such as polyvinyl pyrrolidone, polyvinyl acetate, polyvinylacetate phthalate, vinylacetate crotonic acid copolymer, and ethylene-vinyl acetate copolymers; and shellac (purified lac). In some embodiments at least one polymer functions as taste-masking agents.

[0231] Tablets, pills, and the like can be compressed, multiply compressed, multiply layered, and/or coated. The coating can be single or multiple. In some embodiments, the coating material comprises at least one of a saccharide, a polysaccharide, and glycoproteins extracted from at least one of a plant, a fungus, and a microbe. Non-limiting examples include corn starch, wheat starch, potato starch, tapioca starch, cellulose, hemicellulose, dextrans, maltodextrin, cyclodextrins, inulins, pectin, mannans, gum arabic, locust bean gum, mesquite gum, guar gum, gum karaya, gum ghatti, tragacanth gum, funori, carrageenans, agar, alginates, chitosans, or gellan gum. In some embodiments the coating material comprises a protein. In some embodiments the coating material comprises at least one of a fat and an oil. In some embodiments the at least one of a fat and an oil is high temperature melting. In some embodiments the at least one of a fat and an oil is hydrogenated or partially hydrogenated. In some embodiments the at least one of a fat and an oil is derived from a plant. In some embodiments the at least one of a fat and an oil comprises at least one of glycerides, free fatty acids, and fatty acid esters. In some embodiments the coating material comprises at least one edible wax. The edible wax can be derived from animals, insects, or plants. Non-limiting examples include beeswax, lanolin, bayberry wax, carnauba wax, and rice bran wax.

[0232] In some embodiments, a tablet or pill comprises an inner component surrounding the composition and an outer component, the latter serving as an envelope over the former. The two components can be separated by an enteric coating layer that can resist disintegration in the stomach and permits the inner component to pass intact into the duodenum or to be delayed in release.

[0233] Alternatively, powders or granules embodying a bacterial composition disclosed herein can be incorporated into a food product. In some embodiments, the food product is a drink for oral administration. Non-limiting examples of a suitable drink include fruit juice, a fruit drink, an artificially flavored drink, an artificially sweetened drink, a carbonated beverage, a sports drink, a liquid diary product, a shake, an alcoholic beverage, a caffeinated beverage, infant formula and so forth. Other suitable means for oral administration include aqueous and nonaqueous solutions, emulsions, suspensions and solutions and/or suspensions reconstituted from non-effervescent granules, containing at least one of suitable solvents, preservatives, emulsifying agents, suspending agents, diluents, sweeteners, coloring agents, and flavoring agents.

[0234] In some embodiments, the food product is a solid foodstuff. Suitable examples of a solid foodstuff include without limitation a food bar, a snack bar, a cookie, a brownie, a muffin, a cracker, an ice cream bar, a frozen yogurt bar, and the like.

[0235] In some embodiments, a bacterial composition disclosed herein is incorporated into a therapeutic food. In some embodiments, the therapeutic food is a ready-to-use food that optionally contains some or all essential macronutrients and micronutrients. In some embodiments, a bacterial composition disclosed herein is incorporated into a supplementary food that is designed to be blended into an existing meal. In some embodiments, the supplemental food contains some or all essential macronutrients and micronutrients. In some embodiments, a bacterial composition disclosed herein is blended with or added to an existing food to fortify the food's protein nutrition. Examples include food staples (grain, salt, sugar, cooking oil, margarine), beverages (coffee, tea, soda, beer, liquor, sports drinks), snacks, sweets and other foods.

[0236] In some embodiments, the formulations are filled into gelatin capsules for oral administration. An example of an appropriate capsule is a 250 mg gelatin capsule containing from 10 (up to 100 mg) of lyophilized powder (10⁸ to 10¹¹ bacteria), 160 mg microcrystalline cellulose, 77.5 mg gelatin, and 2.5 mg magnesium stearate. In other embodiments, from about 10⁵ to about 10¹² bacteria can be used, about 10⁵ to about 10⁷, about 10⁶ to about 10⁷, or about 10⁸ to about 10¹⁰, with attendant adjustments of the excipients if necessary. In further embodiments, an enteric-coated capsule or tablet or with a buffering or protective composition can be used. The use of enteric polymers (such as those used to coat a capsule or tablet described herein) can be useful when formulating a bacterial composition disclosed herein for oral administration. In certain embodiments, the enteric polymers allow for more efficient delivery of the bacterial compositions disclosed herein to a subject's gastrointestinal tract. In some embodiments, the enteric-coated capsule or tablet release their contents (i.e., bacteria or combinations of bacteria disclosed herein) when the pH becomes alkaline after the enteric-coated capsule or tablet passes through the stomach. When a pH sensitive composition (e.g., enteric polymers) is used for formulating the bacterial composition, the pH sensitive composition is preferably a polymer whose pH threshold of the decomposition of the composition is 6.8 to 7.5. Such a numeric value range is a range where the pH shifts toward the alkaline side at a distal portion of the stomach, and hence is a suitable range for use in the delivery to the colon.

[0237] Moreover, an approach to improving delivery of a bacterial composition disclosed herein to the colon specifically can include a composition which ensures the delivery to the gastrointestinal tract by delaying the release of the contents by approximately 3 to 5 hours, which corresponds to the small intestinal transit time. In an example of formulating a pharmaceutical preparation comprising the composition for delaying the release, a hydrogel is used as a shell. The hydrogel is hydrated and swells upon contact with gastrointestinal fluid, so that the contents are effectively released. Furthermore the delayed release dosage units include drug-containing compositions having a material which coats or selectively coats a drug. Examples of such a selective coating material include in vivo degradable polymers, gradually hydrolyzable polymers, gradually water-soluble polymers, and/or enzyme degradable polymers. A preferred coating material for efficiently delaying the release is not particularly limited, and examples thereof include cellulose-based polymers such as hydroxypropyl cellulose, acrylic acid polymers and copolymers such as methacrylic acid polymers and copolymers, and vinyl polymers and copolymers such as polyvinylpyrrolidone.

[0238] Additional compositions that target delivery to the colon include bioadhesive compositions which specifically adhere to the colonic mucosal membrane (for example, a polymer described in the specification of U.S. Pat. No. 6,368,586), and compositions into which a protease inhibitor is incorporated for protecting particularly a bacterial composition disclosed herein in the gastrointestinal tracts from decomposition due to an activity of a protease.

[0239] An additional colon-delivery mechanism is via pressure change, such that the contents are released from the colon by generation of gas in bacterial fermentation at a distal portion of the stomach. Such pressure-change is not particularly limited, and a more specific example thereof is a capsule which has contents dispersed in a suppository base and which is coated with a hydrophobic polymer (for example, ethyl cellulose).

[0240] A further composition for delivery to the colon includes, for example, a bacterial composition disclosed herein comprising a component that is sensitive to an enzyme (for example, a carbohydrate hydrolase or a carbohydrate reductase) present in the colon. Such a composition is not particularly limited, and more specific examples thereof include compositions that use food components such as non-starch polysaccharides, amylose, xanthan gum, and azopolymers.

[0241] In some embodiments, a bacterial composition disclosed herein is formulated with a germinant to enhance engraftment or efficacy. In some embodiments, a bacterial composition is formulated or administered with a prebiotic substance to enhance engraftment or efficacy.

[0242] In some embodiments, the number of bacteria of each type can be present in the same level or amount or in different levels or amounts. For example, in a bacterial composition with two types of bacteria, the bacteria can be present in from about a 1:10,000 ratio to about a 1:1 ratio, from about a 1:10,000 ratio to about a 1:1,000 ratio, from about a 1:1,000 ratio to about a 1:100 ratio, from about a 1:100 ratio to about a 1:50 ratio, from about a 1:50 ratio to about a 1:20 ratio, from about a 1:20 ratio to about a 1:10 ratio, from about a 1:10 ratio to about a 1:1 ratio. For bacterial compositions comprising at least three types of bacteria, the ratio of type of bacteria can be chosen pairwise from ratios for bacterial compositions with two types of bacteria. For example, in a bacterial composition comprising bacteria A, B, and C, at least one of the ratio between bacteria A and B, the ratio between bacteria B and C, and the ratio between bacteria A and C can be chosen, independently, from the pairwise combinations above.

### III. Methods of Treating a Subject

[0243] The compositions and formulations disclosed herein can be used for the treatment and/or prevention of a disease or disorder, such as those associated with dysbiosis of a gastrointestinal tract (e.g., an IBD, for example, ulcerative colitis), e.g., by ameliorating one or more sign or symptom of the disease (e.g., induce clinical remission), and/or to reduce the recurrence of active disease (e.g., maintain clinical remission).

[0244] The terms “treat,” “treating,” and “treatment,” as used herein, refer to any type of intervention or process performed on, or administering an active agent to, the subject with the objective of reversing, alleviating, ameliorating, inhibiting, or slowing down or preventing the progression, development, severity or recurrence of a symptom, complication, condition or biochemical indicia associated with a disease or enhancing overall survival. Treating can include reducing at least one sign or symptom associated with a disease or disorder disclosed herein, e.g., ulcerative colitis. Treatment can be of a subject having a disease or a subject who does not have a disease (e.g., for prophylaxis). It is understood that “preventing” can mean reducing the risk of disease, increasing the length of remission, or reducing the rate of relapse.

[0245] In some embodiments, treatment with a formulation is associated with at least one of the following: (i) an increase in the diversity of the gastrointestinal (GI) microbiome in a subject, (ii) a reduction in GI inflammation in a subject, (iii) improvement in mucosal and/or epithelial barrier integrity in a subject compared to a reference control (e.g., untreated patients or the subject prior to treatment), (iv) promotion of mucosal healing and (v) other improvements of at least one sign or symptom of a disease or disorder disclosed herein. Such improvements can also include, for example, improvements detected via biomarkers, such as a decrease or increase in the level of certain biological molecules (e.g., fecal calprotectin, secondary bile acids, tryptophan metabolites, short-chain and medium-chain fatty acids, sphinolipids, and kynurenine) following treatment.

[0246] In some embodiments, when treating a subject suffering from an inflammatory disease (e.g., ulcerative colitis), an improvement in the disease, such as mucosal healing, can be assessed by a reduction in endoscopic Mayo score. Mayo scores are known in the art, e.g., see globalrph.com/mayo clinic score.htm. A reduction in total Mayo score from a pre-treatment score (i.e., baseline) and/or improvements in rectal bleeding and/or endoscopic subscores are indicative of a therapeutic effect.

[0247] In some embodiments, the improvement rate (e.g., clinical remission rate) after treatment with a formulation disclosed herein is at least about 20%, at least about 25%, at least about 30%, at least about 40%, at least about 50%, at least about 60%, at least about 70%, at least about 75%, at least about 80%, at least about 85%, at least about 90%, at least about 95%, or about 100%. In some embodiments, the improvement rate (e.g., clinical remission rate) is improved compared to placebo, e.g., at least 25% versus 10%, respectively. In some embodiments, clinical remission is a Mayo score of 2 points, no individual subscore >1.

[0248] In some embodiments, the clinical response to treatment with a formulation of the present disclosure is improved versus placebo, e.g., at least 25% compared to 10%, respectively. When treating a subject suffering from an inflammatory disease, e.g., ulcerative colitis, mucosal healing is defined as a 0 or 1 on the endoscopy subscore of the Mayo score. A clinical response is, in some embodiments, a decrease from baseline in the Mayo score by ≥30% and/or ≥3 points, accompanied by a decrease in the rectal bleeding subscore of ≥1 or a rectal bleeding subscore of 0 or 1. In some embodiments, clinical response is defined as a decrease of ≥3 points in Total Modified Mayo Score (TMMS) from baseline, along with at least one of a decrease of >1 point in rectal bleeding subscore or absolute rectal bleeding subscore of 0 or 1. Complete remission is defined as a TMMS <2 and an endoscopic subscore of 0 with no erythema, no blood, and no evidence of inflammation. Endoscopic improvement is defined as a decrease in the endoscopic subscore of >1.

[0249] Formulations disclosed herein (e.g., comprising a designed bacterial composition) can be used to treat any disease or disorder associated with a dysbiosis of the gastrointestinal tract. Non-limiting examples of such diseases or disorders are provided throughout the present disclosure.

[0250] Formulations as described herein are useful for administration to a subject, e.g., a mammal, such as a human in need of treatment, e.g., to prevent or treat a disease or disorder disclosed herein or a sign or symptom of a disease or disorder disclosed herein or to prevent recurrence of a disease or disorder disclosed herein. In some embodiments, the mammalian subject is a human subject. In some embodiments, the human subject (e.g., patient) has one or more signs or symptoms of a disease or disorder, such as those associated with a dysbiosis. Non-limiting examples of such signs or symptoms can include, but are not limited to, diarrhea (e.g., containing blood or pus); abdominal pain and cramping; rectal pain; rectal bleeding; urgency to defecate; inability to defecate despite urgency; weight loss; fatigue; fever; failure to grow (in children); severe bleeding; perforated colon; severe dehydration; liver disease; osteoporosis; inflammation of the skin, joints, or eyes; mouth sores; increased risk of colon cancer; toxic megacolon; or increased risk of blood clots in veins and arteries. A therapeutically effective treatment using a formulation provided herein can ameliorate one or more of such signs and symptoms of a disease or disorder disclosed herein. In some embodiments, the patient is in remission and the microbial composition is administered to increase the duration of remission through maintenance therapy.

[0251] Efficacy of a treatment can be determined by evaluating signs and or symptoms and according to whether induction of improvement and/or maintenance of a remission or improved condition is achieved, e.g., for at least about 1 week, at least about two weeks, at least about three weeks, at least about four weeks, at least about 8 weeks, or at least about 12 weeks. For example, in cases of a disease or disorder disclosed herein (e.g., colitis), mucosal healing (as judged endoscopically, histologically, or via imaging techniques) can be used to evaluate the efficacy of a treatment. In certain embodiments, such an approach can be particularly useful for predicting long term clinical outcome in a subject diagnosed with the disease or disorder. Remission or signs or symptoms can be determined using clinical indices, such as, for Crohn's disease, the Crohn's Disease Activity Index (CDAI), the PCDAI, or the amelioration or one or more elements of the PCDAI or CDAI, e.g., number of liquid or soft stools, abdominal pain, general well-being, presence of complications (such as arthralgia or arthritis, uveitis; inflammation of the iris; presence of erythema nodosum, pyoderma gangrenosum, or aphthous ulcers; anal fissures, fistulae, or abscesses; other fistulae, or fever), taking opiates or diphenoxylate/atropine for diarrhea, presence of an abdominal mass, hematocrit of <0.47 (males) or <0.42 (females); or percentage deviation from standard weight. In some embodiments a subject treated according to a method described herein attains and/or remains at a CDAI below 150. In some embodiments, a positive response to a method is a reduction of a subject's CDAI by at least 70 points.

[0252] For ulcerative colitis, indications of therapeutic efficacy include, for example, normalization of stool frequency, lack of urgency, or absence of blood in stools. Clinical improvement (e.g., clinical remission) is considered achieved if at least one sign or symptom is reduced after completion of the treatment. Mucosal healing is one example of a measure of clinical improvement. Other signs/symptoms can include normalization of C-reactive protein and/or other acute phase indicators, decrease in levels of fecal calprotectin and/or lactoferrin, and subjective indicia such as those related to quality of life. Other examples of indicia can include improvement from moderate to mild using the Montreal Classification, the Mayo Score (with or without endoscopy subscore), or the Pediatric Ulcerative Colitis Index. In general, methods and compositions described herein are useful for treating a subject diagnosed with a colitis.

[0253] Other indicators of efficacy of a therapeutic composition and/or method for treating a disease or disorder, such as those associated with dysbiosis include engraftment of at least one bacterial species or OTU identified in a microbiome composition, for example, at about 2 weeks, about 3 weeks, about 4 weeks, about 5 weeks, about 6 weeks, about 7 weeks, about 8 weeks, about 9 weeks, about 10 weeks, about 11 weeks, about 12 weeks, or longer after initial dosing with the microbiome composition; clinical remission at 0 weeks, about 1 week, about 4 weeks, about 5 weeks, about 6 weeks, about 7 weeks, about 8 weeks, about 9 weeks, about 10 weeks, about 11 weeks, about 12 weeks, or longer after initial dosing with the microbiome composition (e.g., for colitis, a Mayo score <=2 with no subscore >1); or endoscopic remission at 0 weeks, about 1 week, about 4 weeks, about 5 weeks, about 6 weeks, about 7 weeks, about 8 weeks, about 9 weeks, about 10 weeks, about 11 weeks, about 12 weeks, or longer after initial dosing with the microbiome composition (e.g., for colitis, Mayo endoscopy score of 0).

[0254] In some embodiments, treatment with a formulation disclosed herein can improve a dysbiosis, including, but not limited to, an improvement in the representation of one or more OTUs identified as reduced in a population of subjects suffering from a disease or disorder associated with dysbiosis (e.g., UC patients with active disease). In some embodiments, treatment with a formulation of the present disclosure can reduce the representation of one or more microbial species that are associated with a disease or disorder disclosed herein.

[0255] In some embodiments, treatment with a formulation disclosed herein can increase the representation of microbial species that are associated with an improvement (e.g., clinical remission) of a disease or disorder disclosed herein.

[0256] In some embodiments, a formulation can increase the prevalence of one or more of the following bacterial species in a subject suffering from a disease or disorder disclosed herein (e.g., in the GI microbiome)): Gemmiger formicilis, Roseburia hominis, Clostridium bolteae, Parasutterella excrementihominis, Holdemania filiformis, Holdemania massiliensis, Bacteroides ovatus, Akkemansia muciniphila, Clostridium leptum, Bilophila wadsworthia, Dielma fastidiosa, Clostridium symbiosum, Eubacterium siraeum, Agathobaculum desmolans, Agathobaculum butyriciproducens, or Bacteroides vulgatus, or Flintibacter SC49. In some embodiments, a formulation disclosed herein can increase the prevalence of one or more bacteria selected from the group consisting of Gemmiger formicilis, Roseburia hominis, Clostridium bolteae, Holdemania filiformis, Holdemania massiliensis, Clostridium leptum, Dielma fastidiosa, Clostridium symbiosum, Eubacterium siraeum, and combinations thereof. In certain embodiments, a formulation comprising a designed composition disclosed herein can increase the prevalence of one or more bacteria selected from those disclosed in Table 4, Table 5, FIG. 13, FIG. 17, FIG. 30, FIG. 31, and/or FIG. 32. In some embodiments, a formulation can increase the prevalence of one or more bacteria comprising a 16S rDNA sequence that is at least about 85%, at least about 90%, at least about 95%, at least about 96%, at least about 97%, at least about 97.5%, at least about 98%, at least about 98.5%, at least about 99%, at least about 99.5%, or about 100% identical to a 16S rDNA sequence set forth in SEQ ID NOs: 1-14, 16-30, 32-36, 39, 41, 44, 45, 47-51, 59-62, 64-68, 72-76, 102-398, or any of the foregoing species.

[0257] In some embodiments, a formulation disclosed herein can increase, in a treated patient, representation of one or more bacterial phyla, genera, or species such as clade 155, e.g., Bacteroides faecis, which are reduced in subjects suffering from a disease or disorder disclosed herein.

[0258] In some embodiments, treatment with a formulation disclosed herein can improve a GI function that is reduced or otherwise aberrant in subjects that have a disease or disorder disclosed herein (e.g., UC). In some embodiments, a formulation disclosed herein can increase or decrease the level of certain biological molecules (e.g., fecal calprotectin, secondary bile acids, tryptophan metabolites, short-chain and medium-chain fatty acids, sphingolipids, and kynurenine) in a treated subject. In some embodiments, the increase or decrease of such biological molecules is correlated with an improvement of the disease (e.g., clinical remission).

[0259] Formulations disclosed herein can be useful in a variety of clinical situations. For example, the formulation can be administered as a complementary treatment to standard treatment regimens for a disease or disorder, such as those disclosed herein. In some embodiments, formulations of the present disclosure can be administered as an alternative to standard treatment regimens. In some embodiments, the formulation disclosed herein has a comparable, if not better, clinical efficacy (e.g., clinical remission rate) compared to standard treatment regimens (e.g., antibiotics or anti-inflammatory drugs, e.g., LIALDA®, PENTASA®, UCERIS®, REMICADE®, ENTYVIO®, SIMPONI®) In some embodiments, formulations of the present disclosure can be administered simultaneously with standard treatment regimens to enhance their activity. In some embodiments, formulations of the present disclosure can be administered simultaneously with standard treatment regimens without exacerbating their adverse event profile.

[0260] In some embodiments, a subject to be treated with a formulation has mild to moderate disease or disorder, such as those disclosed herein (e.g., ulcerative colitis, e.g., a Mayo score of ≥4 and ≤10). In some embodiments, the patient is failing standard of care. In some embodiments, the formulation is used to maintain clinical remission or clinical benefit in a patient with moderate to severe disease being treated with an immunomodulator or immunosuppressant, including anti-TNF, anti-IL23, anti-integrin or other antibody treatments.

[0261] In some embodiments, a subject receives a pretreatment protocol prior to administration of the formulation, wherein the pretreatment protocol prepares the gastrointestinal tract to receive the bacterial composition. In certain embodiments, the pretreatment protocol comprises an oral antibiotic treatment, wherein the antibiotic treatment alters the bacteria in the patient. In specific embodiments, the antibiotic is not absorbed through the gut or minimally bioavailable for systemic distribution. In other embodiments, the pretreatment protocol comprises a colonic cleansing (e.g., enema), wherein the colonic cleansing substantially empties the contents of the patient's colon. As used herein, “substantially emptying the contents of the colon” refers to removal of at least about 75%, at least about 80%, at least about 90%, at least about 95%, or about 100% of the contents of the ordinary volume of colon contents. Antibiotic treatment can precede the colon-cleansing protocol.

[0262] In some embodiments, a pretreatment protocol is administered to a subject at least 1 day, 2 days, 3 days, 5 days, 6 days, 7 days, 10 days, or 15 days prior to administration of a formulation described herein. In some embodiments, the subject receives multiple doses of a formulation. In some embodiments, the subject has at least one sign or symptom of a disease or disorder, such as those disclosed herein prior to administration of the formulation. In other embodiments, the subject does not exhibit a sign or symptom of a disease or disorder, such as those disclosed herein prior to administration of the formulation, e.g., formulation is administered prophylactically to reduce the risk of a sign or symptom of a disease or disorder, such as those disclosed herein.

[0263] In some embodiments, a formulation described herein is administered enterically, in other words, by a route of access to the gastrointestinal tract. This includes oral administration, rectal administration (including enema, suppository, or colonoscopy), by an oral or nasal tube (nasogastric, nasojejunal, oral gastric, or oral jejunal), or any other method known in the art.

[0264] In some embodiments, a formulation is administered to at least one region of the gastrointestinal tract, including the mouth, esophagus, stomach, small intestine, large intestine, and rectum. In other embodiments, a formulation is administered to all regions of the gastrointestinal tract. In certain embodiments, a formulation is administered orally in the form of medicaments such as powders, capsules, tablets, gels or liquids. The formulation can also be administered in gel or liquid form by the oral route or through a nasogastric tube, or by the rectal route in a gel or liquid form, by enema or instillation through a colonoscope or by a suppository.

[0265] In some embodiments, the bacteria and bacterial compositions are provided in a dosage form. In some embodiments, the dosage form is designed for administration of at least one OTU or combination thereof disclosed herein, wherein the total amount of bacterial composition administered is selected from about 0.1 ng to about 10 g, about 10 ng to about 1 g, about 100 ng to about 0.1 g, about 0.1 mg to about 500 mg, about 1 mg to about 1000 mg, from about 1000 to about 5000 mg, or more.

[0266] In some embodiments, the treatment period is at least about 1 day, at least about 2 days, at least about 3 days, at least about 4 days, at least about 5 days, at least about6 days, at least about 1 week, at least about 2 weeks, at least about 3 weeks, at least about 4 weeks, at least about 1 month, at least about 2 months, at least about 3 months, at least about 4 months, at least about 5 months, at least about 6 months, or at least about 1 year. In some embodiments, the treatment period is from about 1 day to 1 week, from about 1 week to 4 weeks, from about 1 month, to 3 months, from about 3 months to 6 months, from about 6 months to 1 year, or for over a year.

[0267] In some embodiments, from about 10⁵ and about 10¹²microorganisms total is administered to the patient in a given dosage form. In certain embodiments, an effective amount can be provided in from about 1 to about 500 ml or from about 1 to about 500 grams of the bacterial composition having from about 10⁷ to about 10¹¹ bacteria per ml or per gram, or a capsule, tablet, or suppository having from about 1 mg to about 1000 mg lyophilized powder having from about 10⁷ to about 10¹¹ bacteria. In some embodiments, those receiving acute treatment receive higher doses than those who are receiving chronic administration (such as hospital workers or those admitted into long-term care facilities).

[0268] In some embodiments, a formulation described herein is administered once, on a single occasion or on multiple occasions, such as once a day for several days or more than once a day on the day of administration (including twice daily, three times daily, or up to five times daily). In some embodiments, a formulation is administered intermittently according to a set schedule, e.g., once a day, once weekly, or once monthly, or when the patient relapses from clinical improvement (e.g., clinical remission) of a disease or disorder, such as those disclosed herein, or exhibits a sign or symptoms of a disease or disorder, such as those disclosed herein. In other embodiments, a formulation is administered on a long-term basis to individuals who are at risk for active disease or disorder, such as those disclosed herein or are diagnosed as being at risk for developing a disease or disorder (e.g., have a family history of UC or a history of isotretinoin use by the individual).

[0269] In some embodiments, a bacterial composition of the present disclosure is administered with other agents (e.g., anti-microbial agents or prebiotics) as a combination therapy mode. In certain embodiments, the administration is sequential, over a period of hours or days. In other embodiments, the administration is simultaneous.

[0270] In some embodiments, a bacterial composition is included in combination therapy with one or more anti-microbial agents, which include anti-bacterial agents, anti-fungal agents, anti-viral agents and anti-parasitic agents.

[0271] Anti-bacterial agents include cephalosporin antibiotics (cephalexin, cefuroxime, cefadroxil, cefazolin, cephalothin, cefaclor, cefamandole, cefoxitin, cefprozil, and ceftobiprole); fluoroquinolone antibiotics (cipro, Levaquin, floxin, tequin, avelox, and norflox); tetracycline antibiotics (tetracycline, minocycline, oxytetracycline, and doxycycline); penicillin antibiotics (amoxicillin, ampicillin, penicillin V, dicloxacillin, carbenicillin, vancomycin, and methicillin); and carbapenem antibiotics (ertapenem, doripenem, imipenem/cilastatin, and meropenem).

[0272] Anti-viral agents include Abacavir, Acyclovir, Adefovir, Amprenavir, Atazanavir, Cidofovir, Darunavir, Delavirdine, Didanosine, Docosanol, Efavirenz, Elvitegravir, Emtricitabine, Enfuvirtide, Etravirine, Famciclovir, Foscarnet, Fomivirsen, Ganciclovir, Indinavir, Idoxuridine, Lamivudine, Lopinavir Maraviroc, MK-2048, Nelfinavir, Nevirapine, Penciclovir, Raltegravir, Rilpivirine, Ritonavir, Saquinavir, Stavudine, Tenofovir Trifluridine, Valaciclovir, Valganciclovir, Vidarabine, Ibacitabine, Amantadine, Oseltamivir, Rimantidine, Tipranavir, Zalcitabine, Zanamivir and Zidovudine.

[0273] Examples of antifungal compounds include, but are not limited to polyene antifungals such as natamycin, rimocidin, filipin, nystatin, amphotericin B, candicin, and hamycin; imidazole antifungals such as miconazole, ketoconazole, clotrimazole, econazole, omoconazole, bifonazole, butoconazole, fenticonazole, isoconazole, oxiconazole, sertaconazole, sulconazole, and tioconazole; triazole antifungals such as fluconazole, itraconazole, isavuconazole, ravuconazole, posaconazole, voriconazole, terconazole, and albaconazole; thiazole antifungals such as abafungin; allylamine antifungals such as terbinafine, naftifine, and butenafine; and echinocandin antifungals such as anidulafungin, caspofungin, and micafungin. Other compounds that have antifungal properties include, but are not limited to polygodial, benzoic acid, ciclopirox, tolnaftate, undecylenic acid, flucytosine or 5-fluorocytosine, griseofulvin, and haloprogin.

[0274] In some embodiments, a bacterial composition is included in combination therapy with one or more corticosteroids, mesalazine, mesalamine, sulfasalazine, sulfasalazine derivatives, immunosuppressive drugs, cyclosporin A, mercaptopurine, azathiopurine, prednisone, methotrexate, antihistamines, glucocorticoids, epinephrine, theophylline, cromolyn sodium, anti-leukotrienes, anti-cholinergic drugs for rhinitis, anti-cholinergic decongestants, mast-cell stabilizers, monoclonal anti-IgE antibodies, vaccines, and combinations thereof.

[0275] A prebiotic is a selectively fermented ingredient that allows specific changes, both in the composition and/or activity in the gastrointestinal microbiota that confers benefits upon a treated subject's well-being and health. Prebiotics can include complex carbohydrates, amino acids, peptides, or other essential nutritional components for the survival of the bacterial composition. Prebiotics include, but are not limited to, amino acids, biotin, fructooligosaccharide, galactooligosaccharides, inulin, lactulose, mannan oligosaccharides, oligofructose-enriched inulin, oligofructose, oligodextrose, tagatose, trans-galactooligosaccharide, andxylooligosaccharides.

[0276] To evaluate a subject, signs or symptoms of an adverse event or disease recurrence are evaluated post-treatment ranging from, e.g., about 1 day to about 6 months after administration of a formulation. One method of evaluation involves obtaining fecal material from the subject and assessment of microbes present in the gastrointestinal tract, e.g., using 16S rDNA or metagenomic shotgun sequencing analysis or other analyses known in the art. Population of the gastrointestinal tract by bacterial species present the formulation as well as augmentation by commensal microbes not present in the formulation can be used to indicate an improvement in the GI dysbiosis associated with e.g., UC, and therefore a decreased risk of an adverse event or a decrease in the severity of an adverse event.

[0277] In addition to treating the different inflammatory diseases disclosed herein (e.g., colitis), Applicant has surprisingly discovered that the designed compositions disclosed herein can be also used to treat diseases or disorders that are generally not associated with pro-inflammatory responses. A non-limiting example of such a disease or disorder is cancer. In some embodiments, the bacterial compositions disclosed herein (e.g., designed compositions) can be used to treat certain cancers, e.g., when administered in combination with other anti-cancer agents. Without being limited to any one particular theory, the compositions disclosed herein are designed to have functional features that target multiple biological pathways. In some embodiments, the functional features are important for the treatment of inflammatory diseases. In other embodiments, the functional features are important for the treatment of cancers. In certain embodiments, the functional features are important for the treatment of both inflammatory diseases and cancers. Non-limiting examples of functional features that can be important for the treatment of both inflammatory diseases and cancers include, but are not limited to, inhibition of HDAC activity, production of short-chain fatty acids, production of tryptophan metabolites, production of IL-18, activation of CD8 T cells by metabolites (e.g., short-chain fatty acids) or macromolecules, activation of antigen presenting cells such as dendritic cells by bacterial antigens, macromolecules and metabolites, or reduced colonic inflammation (e.g., through upregulation of Tregs) enabling recruitment of CD8 T cells to tumors located distally.

[0278] In some embodiments, a designed composition disclosed herein is administered in combination with an additional therapeutic agent used for the treatment of cancers. Such additional therapeutic agents can include, for example, chemotherapy drugs, small molecule drugs or antibodies that stimulate the immune response to a given cancer. In some instances, therapeutic compositions can include an immune checkpoint inhibitor, e.g., an anti-PD-1 antibody, an anti-PD-L1 antibody, or an anti-CTLA-4 antibody. Non-limiting examples of other antibodies that can be used in combination with the designed compositions of the present disclosure include an anti-OX40 (also known as CD134, TNFRSF4, ACT35 and/or TXGPIL) antibody, an anti-CD137 antibody, an anti-LAG-3 antibody, or an anti-GITR antibody.

[0279] In some embodiments, a designed composition disclosed herein, when administered in combination with an anti-cancer agent (e.g., immune checkpoint inhibitor, e.g., anti-PD-1 antibody or an anti-PD-L1 antibody), can reduce tumor volume in a subject. In certain embodiments, tumor volume is decreased by at least about 10%, at least about 20%, at least about 30%, at least about 40%, at least about 50%, at least about 60%, at least about 70%, at least about 80%, or at least about 90% in the subject, compared to a reference (e.g., tumor volume in the subject prior to the administration or a corresponding subject that did not receive the compositions disclosed herein).

[0280] In some embodiments, a designed composition disclosed herein, when administered in combination with an anti-cancer agent (e.g., immune checkpoint inhibitor, e.g., anti-PD-1 antibody or an anti-PD-L1 antibody), can increase the percentage of CD8 T cells and/or CD4 T cells (tumor infiltrating lymphocytes) in the tumor of a subject. In some embodiments, the percentage of CD8 T cells and/or CD4 T cells in the tumor is increased by at least about 10%, at least about 20%, at least about 30%, at least about 40%, at least about 50%, at least about 60%, at least about 70%, at least about 80%, or at least about 90% in the subject, compared to a reference (e.g., tumor volume in the subject prior to the administration or a corresponding subject that did not receive the compositions disclosed herein). As a result of the increase in the percentage of CD8 T cells, in some embodiments, the ratio of CD8 T cells to regulatory T cells in the tumor is increased, e.g., by at least about 10%, at least about 20%, at least about 30%, at least about 40%, at least about 50%, at least about 60%, at least about 70%, at least about 80%, or at least about 90% in the subject, compared to a reference.

[0281] Non-limiting examples of cancers that can be treated with the present disclosure include squamous cell carcinoma, small-cell lung cancer, non-small cell lung cancer, squamous non-small cell lung cancer (NSCLC), nonsquamous NSCLC, glioma, gastrointestinal cancer, renal cancer (e.g., clear cell carcinoma), ovarian cancer, liver cancer, colorectal cancer, endometrial cancer, kidney cancer (e.g., renal cell carcinoma (RCC)), prostate cancer (e.g., hormone refractory prostate adenocarcinoma), thyroid cancer, neuroblastoma, pancreatic cancer, glioblastoma (glioblastoma multiforme), cervical cancer, stomach cancer, bladder cancer, hepatoma, breast cancer, colon carcinoma, and head and neck cancer (or carcinoma), gastric cancer, germ cell tumor, pediatric sarcoma, sinonasal natural killer, melanoma (e.g., metastatic malignant melanoma, such as cutaneous or intraocular malignant melanoma), bone cancer, skin cancer, uterine cancer, cancer of the anal region, testicular cancer, carcinoma of the fallopian tubes, carcinoma of the endometrium, carcinoma of the cervix, carcinoma of the vagina, carcinoma of the vulva, cancer of the esophagus, cancer of the small intestine, cancer of the endocrine system, cancer of the parathyroid gland, cancer of the adrenal gland, sarcoma of soft tissue, cancer of the urethra, cancer of the penis, solid tumors of childhood, cancer of the ureter, carcinoma of the renal pelvis, neoplasm of the central nervous system (CNS), primary CNS lymphoma, tumor angiogenesis, spinal axis tumor, brain cancer, brain stem glioma, pituitary adenoma, Kaposi's sarcoma, epidermoid cancer, squamous cell cancer, T-cell lymphoma, environmentally-induced cancers including those induced by asbestos, virus-related cancers or cancers of viral origin (e.g., human papilloma virus (HPV-related or -originating tumors)), and hematologic malignancies derived from either of the two major blood cell lineages, i.e., the myeloid cell line (which produces granulocytes, erythrocytes, thrombocytes, macrophages and mast cells) or lymphoid cell line (which produces B, T, NK and plasma cells), such as all types of leukemias, lymphomas, and myelomas, e.g., acute, chronic, lymphocytic and/or myelogenous leukemias, such as acute leukemia (ALL), acute myelogenous leukemia (AML), chronic lymphocytic leukemia (CLL), and chronic myelogenous leukemia (CML), undifferentiated AML (MO), myeloblastic leukemia (Ml), myeloblastic leukemia (M2; with cell maturation), promyelocytic leukemia (M3 or M3 variant [M3V]), myelomonocytic leukemia (M4 or M4 variant with eosinophilia [M4E]), monocytic leukemia (M5), erythroleukemia (M6), megakaryoblastic leukemia (M7), isolated granulocytic sarcoma, and chloroma; lymphomas, such as Hodgkin's lymphoma (HL), non-Hodgkin's lymphoma (NHL), B cell hematologic malignancy, e.g., B-cell lymphomas, T-cell lymphomas, lymphoplasmacytoid lymphoma, monocytoid B-cell lymphoma, mucosa-associated lymphoid tissue (MALT) lymphoma, anaplastic (e.g., Ki 1+) large-cell lymphoma, adult T-cell lymphoma/leukemia, mantle cell lymphoma, angio immunoblastic T-cell lymphoma, angiocentric lymphoma, intestinal T-cell lymphoma, primary mediastinal B-cell lymphoma, precursor T-lymphoblastic lymphoma, T-lymphoblastic; and lymphoma/leukaemia (T-Lbly/T-ALL), peripheral T-cell lymphoma, lymphoblastic lymphoma, post-transplantation lymphoproliferative disorder, true histiocytic lymphoma, primary central nervous system lymphoma, primary effusion lymphoma, B cell lymphoma, lymphoblastic lymphoma (LBL), hematopoietic tumors of lymphoid lineage, acute lymphoblastic leukemia, diffuse large B-cell lymphoma, Burkitt's lymphoma, follicular lymphoma, diffuse histiocytic lymphoma (DHL), immunoblastic large cell lymphoma, precursor B-lymphoblastic lymphoma, cutaneous T-cell lymphoma (CTLC) (also called mycosis fungoides or Sezary syndrome), and lymphoplasmacytoid lymphoma (LPL) with Waldenstrom's macroglobulinemia; myelomas, such as IgG myeloma, light chain myeloma, nonsecretory myeloma, smoldering myeloma (also called indolent myeloma), solitary plasmocytoma, and multiple myelomas, chronic lymphocytic leukemia (CLL), hairy cell lymphoma; hematopoietic tumors of myeloid lineage, tumors of mesenchymal origin, including fibrosarcoma and rhabdomyoscarcoma; seminoma, teratocarcinoma, tumors of the central and peripheral nervous, including astrocytoma, schwannomas; tumors of mesenchymal origin, including fibrosarcoma, rhabdomyoscaroma, and osteosarcoma; and other tumors, including melanoma, xeroderma pigmentosum, keratoacanthoma, seminoma, thyroid follicular cancer and teratocarcinoma, hematopoietic tumors of lymphoid lineage, for example T-cell and B-cell tumors, including but not limited to T-cell disorders such as T-prolymphocytic leukemia (T-PLL), including of the small cell and cerebriform cell type; large granular lymphocyte leukemia (LGL) of the T-cell type; a/d T-NHL hepatosplenic lymphoma; peripheral/post-thymic T cell lymphoma (pleomorphic and immunoblastic subtypes); angiocentric (nasal) T-cell lymphoma; cancer of the head or neck, renal cancer, rectal cancer, cancer of the thyroid gland; acute myeloid lymphoma, as well as any combinations of said cancers. The methods described herein can also be used for treatment of metastatic cancers, unrespectable, refractory cancers (e.g., cancers refractory to previous immunotherapy, e.g., with a blocking CTLA-4 or PD-1 antibody), and/or recurrent cancers.

### IV. Methods of Identifying Suitable FMT Donors

[0282] Applicant has discovered that certain microbiome profiles, e.g., families, genera, and/or species, are associated with improved clinical efficacy in a disease or disorder, such as those disclosed herein (e.g., ulcerative colitis patients). Accordingly, in certain aspects, the present disclosure provides a method of selecting donors whose feces are useful for preparing bacterial compositions and formulations disclosed herein. In some embodiments, the method comprises: a) obtaining a microbiome sample from a subject (i.e., potential donor), and b) determining the prevalence of a family, genera, and/or species of bacteria in the microbiome sample.

[0283] In some embodiments, the subject is a suitable donor if the microbiome sample comprises one or more bacteria from the family Ruminococcaceae, Lachnospiraceae, Sutterellaceae, Clostridiaceae, Erysipelotrichaceae, Bacteroidaceae, Akkermansiaceae, Peptostreptococcaceae, Eubacteriaceae, or Desulfovibrionaceae. In some embodiments, the subject is a suitable donor if the microbiome sample comprises one or more of the following bacterial species: Gemmiger formicilis, Roseburia hominis, Clostridium bolteae, Parasutterella excrementihominis, Holdemania filiformis, Holdemania massiliensis, Bacteroides ovatus, Akkemansia muciniphila, Clostridium leptum, Bilophila wadsworthia, Dielma fastidiosa, Clostridium symbiosum, Eubacterium siraeum, Agathobaculum desmolans, Agathobaculum butyriciproducens, or Bacteroides vulgatus. In some embodiments, the subject is a suitable donor if the microbiome sample comprises one or more of the following bacterial species: Anaerotruncus colihominis, Blautia producta, Clostridium bolteae, Clostridium disporicum, Clostridium ghonii, Clostridium glycolicum, Clostridium innocuum, Clostridium lactatifermentans, Clostridium viride, Eubacterium sp. WAL 14571, Lachnospiraceae bacterium 3 1 57FA, Lachnospiraceae bacterium oral taxon F15, Lactonifactor longoviformis, or Ruminococcus lactaris. In certain embodiments, the subject is a suitable donor if the microbiome sample comprises one or more bacteria disclosed in Table 4, Table 5, FIG. 13, FIG. 17, FIG. 30, FIG. 31, and/or FIG. 32. In some embodiments, the subject is a suitable donor if the microbiome sample comprises one or more bacteria comprising a 16S rDNA sequence that is at least about 85%, at least about 90%, at least about 95%, at least about 96%, at least about 97%, at least about 97.5%, at least about 98%, at least about 98.5%, at least about 99%, at least about 99.5%, or about 100% identical to a 16S rDNA sequence set forth in SEQ ID NOs: 1-14, 16-30, 32-36, 39, 41, 44, 45, 47-51, 59-62, 64-68, 72-76, 102-398 or any of the foregoing species.

[0284] In some embodiments, a donor is selected that produce relatively higher concentrations of spores in fecal material than other donors. In further embodiments, a donor is selected that provide fecal material from which spores having increased efficacy are purified; this increased efficacy is measured using in vitro or in animal studies as described herein or by any other method known in the art. In some embodiments, a donor can be subjected to one or more pre-donation treatments to reduce undesired material in the fecal material, and/or increase desired spore populations.

[0285] It is advantageous to screen the health of a donor subject prior to and optionally, one or more times after, the collection of the fecal material. Such screening identifies donors carrying pathogenic materials such as viruses (HIV, hepatitis, polio) and pathogenic bacteria. Post-collection, donors are screened about one week, two weeks, three weeks, one month, two months, three months, six months, one year or more than one year, and the frequency of such screening can be daily, weekly, bi-weekly, monthly, bi-monthly, semi-yearly or yearly. In some embodiments, donors that are screened and do not test positive, either before or after donation or both, are considered “validated” or suitable donors.

V. Methods of Identifying a Candidate for Treatment with a Designed Composition

[0286] Applicant has discovered that certain microbiome profiles, e.g., families, genera, and/or species, are associated with an exacerbation or non-improvement (e.g., no clinical remission) of a disease or disorder, such as those disclosed herein (e.g., ulcerative colitis). Accordingly, in certain aspects, the present disclosure provides a method of identifying a subject with a reduced likelihood of responding to a bacterial composition or formulation disclosed herein. Alternatively, provided herein is a method for identifying a subject who is likely to respond (e.g., clinical remission) to a bacterial composition or formulation disclosed herein. In some embodiments, the method comprises: a) obtaining a microbiome sample from a subject (e.g., ulcerative colitis patient who received a bacterial composition disclosed herein), and b) determining the prevalence of a family, genera, and/or species of bacteria in the microbiome sample.

[0287] In some embodiments, the subject is not likely to respond to a treatment disclosed herein if the microbiome sample comprises one or more of the following bacterial species: Eubacterium contortum, Clostridium hathewayi, Erysipelatoclostridum ramosum, Bifidobacterium dentium, Dialister invisus, Prevotella copri, Veillonella atypica, Veillonella dispar, Veillonella parvula, or Veillonella ratti. In some embodiments, the subject is not likely to respond if the microbiome sample comprises one or more bacteria comprising a 16S rDNA sequence that is at least about 85%, at least about 90%, at least about 95%, at least about 96%, at least about 97%, at least about 97.5%, at least about 98%, at least about 98.5%, at least about 99%, at least about 99.5%, or about 100% identical to a 16S rDNA sequence set forth in SEQ ID NO: 15, 31, 37, 38, 40, 42, 43, 46, 52-58, 63, 69-71, and 83-101 or any of the foregoing species.

[0288] In some embodiments, the subject is likely to respond to a treatment disclosed herein if the microbiome sample does not comprise one or more of the following bacterial species: Eubacterium contortum, Clostridium hathewayi, Erysipelatoclostridum ramosum, Bifidobacterium dentium, Dialister invisus, Prevotella copri, Veillonella atypica, Veillonella dispar, Veillonella parvula, or Veillonella ratti. In some embodiments, the subject is likely to respond to treatment if the microbiome sample does not comprise one or more bacteria comprising a 16S rDNA sequence that is at least about 85%, at least about 90%, at least about 95%, at least about 96%, at least about 97%, at least about 97.5%, at least 98%, at least about 98.5%, at least 99%, at least about 99.5%, or about 100% identical to a 16S rDNA sequence set forth in SEQ ID NO: 15, 31, 37, 38, 40, 42, 43, 46, 52-58, 63, 69-71, and 83-101 or any of the foregoing species.

[0289] In some embodiments, the subject, e.g., an individual diagnosed with a disease or disorder, such as those disclosed herein, is a candidate for treatment with a composition disclosed herein if a GI microbiome sample from the subject comprises one or more of the following bacterial species: Gemmiger formicilis, Roseburia hominis, Clostridium bolteae, Parasutterella excrementihominis, Holdemania filiformis, Holdemania massiliensis, Bacteroides ovatus, Akkemansia muciniphila, Clostridium leptum, Bilophila wadsworthia, Dielma fastidiosa, Clostridium symbiosum, Eubacterium siraeum, Agathobaculum desmolans, Agathobaculum butyriciproducens, or Bacteroides vulgatus. In some embodiments, the subject is a candidate for treatment with a composition disclosed herein if a GI microbiome sample comprises Anaerotruncus colihominis, Blautia producta, Clostridium bolteae, Clostridium disporicum, Clostridium ghonii, Clostridium glycolicum, Clostridium innocuum, Clostridium lactatifermentans, Clostridium viride, Eubacterium sp. WAL 14571, Lachnospiraceae bacterium 3 1 57FA, Lachnospiraceae bacterium oral taxon F15, Lactonifactor longoviformis, or Ruminococcus lactaris. In some embodiments, the subject is a suitable donor if the microbiome sample from the subject comprises one or more bacteria disclosed in Table 4, Table 5, FIG. 13, FIG. 17, FIG. 30, FIG. 31, and/or FIG. 32. In some embodiments, the subject is a candidate for treatment with a composition disclosed herein if the microbiome sample comprises one or more bacteria comprising a 16S rDNA sequence that is at least about 85%, at least about 90%, at least about 95%, at least about 96%, at least about 97%, at least about 97.5%, at least about 98%, at least about 98.5%, at least about 99%, at least about 99.5%, or about 100% identical to a 16S rDNA sequence set forth in SEQ ID NOs: 1-14, 16-30, 32-36, 39, 41, 44, 45, 47-51, 59-62, 64-68, 72-76, 102-398 or any of the foregoing species. A candidate for treatment is a subject likely to respond to treatment with a composition provided herein by improvement in one or more signs or symptoms of a disease or disorder, such as those associated with a dysbiosis.

### Additional Information

[0290] Certain terms used in the present application are defined as follows. Additional definitions are set forth throughout the detailed description.

[0291] It is to be noted that the term “a” or “an” entity refers to one or more of that entity; for example, “a nucleotide sequence,” is understood to represent one or more nucleotide sequences. As such, the terms “a” (or “an”), “one or more,” and “at least one” can be used interchangeably herein.

[0292] Furthermore, “and/or” where used herein is to be taken as specific disclosure of each of the two specified features or components with or without the other. Thus, the term “and/or” as used in a phrase such as “A and/or B” herein is intended to include “A and B,” “A or B,” “A” (alone), and “B” (alone). Likewise, the term “and/or” as used in a phrase such as “A, B, and/or C” is intended to encompass each of the following aspects: A, B, and C; A, B, or C; A or C; A or B; B or C; A and C; A and B; B and C; A (alone); B (alone); and C (alone).

[0293] It is understood that wherever aspects are described herein with the language “comprising,” otherwise analogous aspects described in terms of “consisting of” and/or “consisting essentially of” are also provided.

[0294] Unless defined otherwise, all technical and scientific terms used herein have the same meaning as commonly understood by one of ordinary skill in the art to which this disclosure is related.

[0295] Units, prefixes, and symbols are denoted in their Systeme International de Unites (SI) accepted form. Numeric ranges are inclusive of the numbers defining the range. Unless otherwise indicated, nucleotide sequences are written left to right in 5′ to 3′ orientation. Amino acid sequences are written left to right in amino to carboxy orientation. The headings provided herein are not limitations of the various aspects of the disclosure, which can be had by reference to the specification as a whole. Accordingly, the terms defined immediately below are more fully defined by reference to the specification in its entirety.

[0296] The term “about” is used herein to mean approximately, roughly, around, or in the regions of. When the term “about” is used in conjunction with a numerical range, it modifies that range by extending the boundaries above and below the numerical values set forth. In general, the term “about” can modify a numerical value above and below the stated value by a variance of, e.g., 10 percent, 5 percent, 3 percent, 2 percent, or 1 percent; up or down (higher or lower).

[0297] The term “clade” refers to the OTUs or members of a phylogenetic tree that are downstream of a statistically valid node in a phylogenetic tree. The clade comprises a set of terminal leaves in the phylogenetic tree that is a distinct monophyletic evolutionary unit and that share some extent of sequence similarity.

[0298] The term “microbiota” refers to the ecological community of microorganisms that occur (sustainably or transiently) in and on an animal subject, typically a mammal such as a human, including eukaryotes, archaea, bacteria, and viruses (including bacterial viruses i.e., phage).

[0299] The term “microbiome” refers to the microbes that live in and on the human body, both sustainably and transiently, including eukaryotes, archaea, bacteria, and viruses (including bacterial viruses (i.e., phage)). As used herein, “genetic content” includes genomic DNA, RNA such as ribosomal RNA, the epigenome, plasmids, and all other types of genetic information.

[0300] The term “ecological niche” or “niche” refers to the ecological space in which an organism or group of organisms occupies. Niche describes how an organism or population or organisms responds to the distribution of resources, physical parameters (e.g., host tissue space) and competitors (e.g., by growing when resources are abundant, and when predators, parasites and pathogens are scarce) and how it in turn alters those same factors (e.g., limiting access to resources by other organisms, acting as a food source for predators and a consumer of prey).

[0301] The term “dysbiosis” refers to a state of the microbiota of the GI tract or other body area in a subject, including mucosal or skin surfaces in which the normal diversity and/or function of the ecological network is disrupted. This unhealthy state can be due to a decrease in diversity, the overgrowth of one or more pathogens or pathobionts, symbiotic organisms able to cause disease only when certain genetic and/or environmental conditions are present in a subject, or the shift to an ecological microbial network that no longer provides an essential function to the host subject, and therefore no longer promotes health.

[0302] As used herein, the term “operational taxonomic units” or “OTU” (or plural, “OTUs”) refers to a terminal leaf in a phylogenetic tree and is defined by a nucleic acid sequence, e.g., the entire genome, or a specific genetic sequence, and all sequences that share sequence identity to this nucleic acid sequence at the level of species. In some embodiments the specific genetic sequence can be the 16S rDNA sequence or a portion of the 16S rDNA sequence. In other embodiments, the entire genomes of two entities are sequenced and compared. In another embodiment, select regions such as multilocus sequence tags (MLST), specific genes, or sets of genes can be genetically compared. In 16S embodiments, OTUs that share ?97% average nucleotide identity across the entire 16S or a variable region of the 16S rDNA, e.g., a V4 region, are considered the same OTU (see, e.g., Claesson M J, Wang Q, O'Sullivan O, Greene-Diniz R, Cole J R, Ros R P, and O'Toole P W. 2010. Comparison of two next-generation sequencing technologies for resolving highly complex microbiome composition using tandem variable 16S rRNA gene regions. Nucleic Acids Res 38: e200. Konstantinidis K T, Ramette A, and Tiedje J M. 2006. The bacterial species definition in the genomic era. Philos Trans R Soc Lond B Biol Sci 361: 1929-1940). In embodiments involving the complete genome, MLSTs, specific genes, or sets of genes OTUs that share ?95% average nucleotide identity are considered the same OTU (see, e.g., Achtman M, and Wagner M. 2008. Microbial diversity and the genetic nature of microbial species. Nat. Rev. Microbiol. 6: 431-440. Konstantinidis K T, Ramette A, and Tiedje J M. 2006. The bacterial species definition in the genomic era. Philos Trans R Soc Lond B Biol Sci 361: 1929-1940.). OTUs are frequently defined by comparing sequences between organisms. Generally, sequences with less than 95% sequence identity are not considered to form part of the same OTU. In some cases, an OTU is characterized by a combination of nucleotide markers, genes, and/or single nucleotide variants (SNVs). In some cases, the referenced genes are highly conserved genes (e.g., “house-keeping” genes). The features defining an OTU can be a combination of the foregoing. Such characterization employs, e.g., WGS data or a whole genome sequence.

[0303] As used herein, the term “phylogenetic tree” refers to a graphical representation of the evolutionary relationships of one genetic sequence to another that is generated using a defined set of phylogenetic reconstruction algorithms (e.g., parsimony, maximum likelihood, or Bayesian). Nodes in the tree represent distinct ancestral sequences and the confidence of any node is provided by a bootstrap or Bayesian posterior probability, which measures branch uncertainty.

[0304] The specification is most thoroughly understood in light of the teachings of the references cited within the specification. The embodiments within the specification provide an illustration of embodiments and should not be construed to limit the scope. The skilled artisan readily recognizes that many other embodiments are encompassed. All publications and patents cited in this disclosure are incorporated by reference in their entirety. To the extent the material incorporated by reference contradicts or is inconsistent with this specification, the specification will supersede any such material. The citation of any references herein is not an admission that such references are prior art.

[0305] As used herein, the term “subject” refers to any animal subject including humans, laboratory animals (e.g., primates, rats, mice), livestock (e.g., cows, sheep, goats, pigs, turkeys, and chickens), and household pets (e.g., dogs, cats, and rodents). The subject can be suffering from a dysbiosis, including, but not limited to, an infection due to a gastrointestinal pathogen or can be at risk of developing or transmitting to others an infection due to a gastrointestinal pathogen. In some embodiments, the subject is suffering from an ulcerative colitis.

[0306] Ulcerative colitis (UC) is a disease of the large intestine (colon) characterized by chronic diarrhea with cramping abdominal pain, rectal bleeding, and loose discharges of blood, pus and mucus. The manifestations of ulcerative colitis vary widely. A pattern of exacerbations and improvements typifies the clinical course of most UC patients (70%), although continuous symptoms without improvement are present in some patients with UC. Local and systemic complications of UC include arthritis, eye inflammation such as uveitis, skin ulcers and liver disease. In addition, ulcerative colitis and especially long-standing, extensive disease is associated with an increased risk of colon carcinoma. Bacterial compositions provided herein can be used to ameliorate one or more characteristics of ulcerative colitis or other IBD.

[0307] Several pathologic features characterize UC in distinction to other inflammatory bowel diseases. Ulcerative colitis is a diffuse disease that usually extends from the most distal part of the rectum for a variable distance proximally. The term left-sided colitis describes an inflammation that involves the distal portion of the colon, extending as far as the splenic flexure. Sparing of the rectum or involvement of the right side (proximal portion) of the colon alone is unusual in ulcerative colitis. The inflammatory process of ulcerative colitis is limited to the colon and does not involve, for example, the small intestine, stomach or esophagus. In addition, ulcerative colitis is distinguished by a superficial inflammation of the mucosa that generally spares the deeper layers of the bowel wall. Crypt abscesses, in which degenerated intestinal crypts are filled with neutrophils, also are typical of ulcerative colitis (Rubin and Farber, supra, 1994).

[0308] Ulcerative colitis can be further categorized as “mild,” “moderate,” “severe,” or “fulminant” (very severe). In some embodiments, the ulcerative colitis to be treated is mild to moderate, e.g., a Mayo score of ≥4 and ≤10. In some embodiments a patient to be treated with a microbiome composition has been diagnosed with moderately to severely active UC. In some embodiments, the patient diagnosed with UC has had an inadequate response to, loss of response, or is intolerant to conventional or biologic therapy. In some embodiments, a subject treated with a microbiome composition exhibits one of more of the following improvements: clinical response based on a Mayo score, e.g., modified Mayo score (MMS), endoscopic remission based on the MMS Endoscopic Subscore (ES), symptomatic remission based on MMS Stool Frequency (SF) and Rectal Bleeding (RB) subscores, symptomatic response based on MMS SF and RB subscores, mucosal healing based on a histologic disease activity index (Geboes score or Robards Histology Index), endoscopic response based on the MMS ES, UC symptoms based on NRS scores, Health Related Quality of Life based on IBDQ score, and change from baseline to Week 7, 8, or 12 in fecal calprotectin levels.

[0309] In addition to ulcerative colitis, the bacterial compositions disclosed herein can also be useful for the treatment of other diseases or disorders, including those associated with a dysbiosis of the gastrointestinal tract. Without being bound by any one theory, bacterial compositions disclosed herein can treat such diseases or disorders by engrafting and repopulating the gastrointestinal tract of a subject, and thereby shift the subject's microbiome from one of dysbiosis to one that more resembles a healthy state. In some embodiments, bacterial compositions disclosed herein can prevent the growth of a pathogen associated with a disease or disorder disclosed herein (e.g., by outcompeting for growth nutrients). In some embodiments, a bacterial composition disclosed herein can be designed to produce various factors that can, e.g., reduce and/or inhibit a pro-inflammatory immune response (e.g., by producing factors, such as tryptophan metabolites, fatty acids, secondary bile acid, or by inhibiting HDAC activation).

[0310] Non-limiting examples of such diseases or disorders include immune-mediated gastrointestinal disorders, including, but not limited to, Crohn's disease, lymphocytic colitis; microscopic colitis; collagenous colitis; autoimmune enteropathy, including autoimmune enteritis and autoimmune enteroolitis; allergic gastrointestinal disease: and eosinophilic gastroimestinal disease, including eosinophilic gastroenteritis and eosinophilic enteropathy. Non-limiting examples of other immune-mediated disorders that may be treated with a composition described herein include: arthritis (acute and chronic, rheumatoid arthritis including juvenile-onset rheumatoid arthritis and stages such as rheumatoid synovitis, gout or gouty arthritis, acute immunological arthritis, chronic inflammatory arthritis, degenerative arthritis, type II collagen-induced arthritis, infectious arthritis, Lyme arthritis, proliferative arthritis, psoriatic arthritis, Still's disease, vertebral arthritis, osteoarthritis, arthritis chronica progrediente, arthritis deformans, polyarthritis chronica primaria, reactive arthritis, menopausal arthritis, estrogen-depletion arthritis, and ankylosing spondylitis/rheumatoid spondylitis), autoimmune lymphoproliferative disease, inflammatory hyperproliferative skin diseases, psoriasis such as plaque psoriasis, gutatte psoriasis, pustular psoriasis, and psoriasis of the nails, atopy including atopic diseases such as hay fever and Job's syndrome, dermatitis including contact dermatitis, chronic contact dermatitis, exfoliative dermatitis, allergic dermatitis, allergic contact dermatitis, hives, dermatitis herpetiformis, nummular dermatitis, seborrheic dermatitis, non-specific dermatitis, primary irritant contact dermatitis, and atopic dermatitis, x-linked hyper IgM syndrome, allergic intraocular inflammatory diseases, urticaria such as chronic allergic urticaria and chronic idiopathic urticaria, including chronic autoimmune urticaria, myositis, polymyositis/dermatomyositis, juvenile dermatomyositis, toxic epidermal necrolysis, scleroderma (including systemic scleroderma), sclerosis such as systemic sclerosis, multiple sclerosis (MS) such as spino-optical MS, primary progressive MS (PPMS), and relapsing remitting MS (RRMS), progressive systemic sclerosis, atherosclerosis, arteriosclerosis, sclerosis disseminata, ataxic sclerosis, neuromyelitis optica (NMO), inflammatory bowel disease (IBD) (for example, Crohn's disease, autoimmune-mediated gastrointestinal diseases, gastrointestinal inflammation, colitis such as ulcerative colitis, colitis ulcerosa, microscopic colitis, collagenous colitis, colitis polyposa, necrotizing enterocolitis, and transmural colitis, and autoimmune inflammatory bowel disease), bowel inflammation, pyoderma gangrenosum, erythema nodosum, primary sclerosing cholangitis, respiratory distress syndrome, including adult or acute respiratory distress syndrome (ARDS), meningitis, inflammation of all or part of the uvea, iritis, choroiditis, an autoimmune hematological disorder, graft-versus-host disease, angioedema such as hereditary angioedema, cranial nerve damage as in meningitis, herpes gestationis, pemphigoid gestationis, pruritis scroti, autoimmune premature ovarian failure, sudden hearing loss due to an autoimmune condition, IgE-mediated diseases such as anaphylaxis and allergic and atopic rhinitis, encephalitis such as Rasmussen's encephalitis and limbic and/or brainstem encephalitis, uveitis, such as anterior uveitis, acute anterior uveitis, granulomatous uveitis, nongranulomatous uveitis, phacoantigenic uveitis, posterior uveitis, or autoimmune uveitis, glomerulonephritis (GN) with and without nephrotic syndrome such as chronic or acute glomerulonephritis such as primary GN, immune-mediated GN, membranous GN (membranous nephropathy), idiopathic membranous GN or idiopathic membranous nephropathy, membrano- or membranous proliferative GN (MPGN), including Type I and Type II, and rapidly progressive GN (RPGN), proliferative nephritis, autoimmune polyglandular endocrine failure, balanitis including balanitis circumscripta plasmacellularis, balanoposthitis, erythema annulare centrifugum, erythema dyschromicum perstans, eythema multiform, granuloma annulare, lichen nitidus, lichen sclerosus et atrophicus, lichen simplex chronicus, lichen spinulosus, lichen planus, lamellar ichthyosis, epidermolytic hyperkeratosis, premalignant keratosis, pyoderma gangrenosum, allergic conditions and responses, food allergies, drug allergies, insect allergies, rare allergic disorders such as mastocytosis, allergic reaction, eczema including allergic or atopic eczema, asteatotic eczema, dyshidrotic eczema, and vesicular palmoplanar eczema, asthma such as asthma bronchiale, bronchial asthma, and auto-immune asthma, conditions involving infiltration of T cells and chronic inflammatory responses, immune reactions against foreign antigens such as fetal A-B-0 blood groups during pregnancy, chronic pulmonary inflammatory disease, autoimmune myocarditis, leukocyte adhesion deficiency, lupus, including lupus nephritis, lupus cerebritis, pediatric lupus, non-renal lupus, extra-renal lupus, discoid lupus and discoid lupus erythematosus, alopecia lupus, SLE, such as cutaneous SLE or subacute cutaneous SLE, neonatal lupus syndrome (NLE), and lupus erythematosus disseminatus, juvenile onset (Type I) diabetes mellitus, including pediatric IDDM, adult onset diabetes mellitus (Type II diabetes), autoimmune diabetes, idiopathic diabetes insipidus, diabetic retinopathy, diabetic nephropathy, diabetic colitis, diabetic large-artery disorder, immune responses associated with acute and delayed hypersensitivity mediated by cytokines and T-lymphocytes, tuberculosis, sarcoidosis, granulomatosis including lymphomatoid granulomatosis, agranulocytosis, vasculitides (including large-vessel vasculitis such as polymyalgia rheumatica and giant-cell (Takayasu's) arteritis, medium-vessel vasculitis such as Kawasaki's disease and polyarteritis nodosa/periarteritis nodosa, immunovasculitis, CNS vasculitis, cutaneous vasculitis, hypersensitivity vasculitis, necrotizing vasculitis such as fibrinoid necrotizing vasculitis and systemic necrotizing vasculitis, ANCA-negative vasculitis, and ANCA-associated vasculitis such as Churg-Strauss syndrome (CSS), Wegener's granulomatosis, and microscopic polyangiitis), temporal arteritis, aplastic anemia, autoimmune aplastic anemia, Coombs positive anemia, Diamond Blackfan anemia, hemolytic anemia or immune hemolytic anemia including autoimmune hemolytic anemia (AIHA), pernicious anemia (anemia perniciosa), Addison's disease, pure red cell anemia or aplasia (PRCA), Factor VIII deficiency, hemophilia A, autoimmune neutropenia(s), cytopenias such as pancytopenia, leukopenia, diseases involving leukocyte diapedesis, CNS inflammatory disorders, Alzheimer's disease, Parkinson's disease, multiple organ injury syndrome such as those secondary to septicemia, trauma or hemorrhage, antigen-antibody complex-mediated diseases, anti-glomerular basement membrane disease, anti-phospholipid antibody syndrome, motoneuritis, allergic neuritis, Behcet's disease/syndrome, Castleman's syndrome, Goodpasture's syndrome, Reynaud's syndrome, Sjogren's syndrome, Stevens-Johnson syndrome, pemphigoid or pemphigus such as pemphigoid bullous, cicatricial (mucous membrane) pemphigoid, skin pemphigoid, pemphigus vulgaris, paraneoplastic pemphigus, pemphigus foliaceus, pemphigus mucus-membrane pemphigoid, and pemphigus erythematosus, epidermolysis bullosa acquisita, ocular inflammation, including allergic ocular inflammation such as allergic conjunctivis, linear IgA bullous disease, autoimmune-induced conjunctival inflammation, autoimmune polyendocrinopathies, Reiter's disease or syndrome, thermal injury due to an autoimmune condition, preeclampsia, an immune complex disorder such as immune complex nephritis, antibody-mediated nephritis, neuroinflammatory disorders, polyneuropathies, chronic neuropathy such as IgM polyneuropathies or IgM-mediated neuropathy, thrombocytopenia (as developed by myocardial infarction patients, for example), including thrombotic thrombocytopenic purpura (TTP), post-transfusion purpura (PTP), heparin-induced thrombocytopenia, and autoimmune or immune-mediated thrombocytopenia including, for example, idiopathic thrombocytopenic purpura (ITP) including chronic or acute ITP, scleritis such as idiopathic cerato-scleritis, episcleritis, autoimmune disease of the testis and ovary including autoimmune orchitis and oophoritis, primary hypothyroidism, hypoparathyroidism, autoimmune endocrine diseases including thyroiditis such as autoimmune thyroiditis, Hashimoto's disease, chronic thyroiditis (Hashimoto's thyroiditis), or subacute thyroiditis, autoimmune thyroid disease, idiopathic hypothyroidism, Grave's disease, Grave's eye disease (ophthalmopathy or thyroid-associated ophthalmopathy), polyglandular syndromes such as autoimmune polyglandular syndromes, for example, type I (or polyglandular endocrinopathy syndromes), paraneoplastic syndromes, including neurologic paraneoplastic syndromes such as Lambert-Eaton myasthenic syndrome or Eaton-Lambert syndrome, stiff-man or stiff-person syndrome, encephalomyelitis such as allergic encephalomyelitis or encephalomyelitis allergica and experimental allergic encephalomyelitis (EAE), myasthenia gravis such as thymoma-associated myasthenia gravis, cerebellar degeneration, neuromyotonia, opsoclonus or opsoclonus myoclonus syndrome (OMS), and sensory neuropathy, multifocal motor neuropathy, Sheehan's syndrome, autoimmune hepatitis, chronic hepatitis, lupoid hepatitis, giant-cell hepatitis, chronic active hepatitis or autoimmune chronic active hepatitis, pneumonitis such as lymphoid interstitial pneumonitis (LIP), bronchiolitis obliterans (non-transplant) vs. NSIP, Guillain-Barre syndrome, Berger's disease (IgA nephropathy), idiopathic IgA nephropathy, linear IgA dermatosis, acute febrile neutrophilic dermatosis, subcorneal pustular dermatosis, transient acantholytic dermatosis, cirrhosis such as primary biliary cirrhosis and pneumonocirrhosis, autoimmune enteropathy syndrome, Celiac or Coeliac disease, celiac sprue (gluten enteropathy), refractory sprue, idiopathic sprue, cryoglobulinemia such as mixed cryoglobulinemia, amylotrophic lateral sclerosis (ALS; Lou Gehrig's disease), coronary artery disease, autoimmune ear disease such as autoimmune inner ear disease (AIED), autoimmune hearing loss, polychondritis such as refractory or relapsed or relapsing polychondritis, pulmonary alveolar proteinosis, keratitis such as Cogan's syndrome/nonsyphilitic interstitial keratitis, Bell's palsy, Sweet's disease/syndrome, rosacea autoimmune, zoster-associated pain, amyloidosis, a non-cancerous lymphocytosis, a primary lymphocytosis, which includes monoclonal B cell lymphocytosis (e.g., benign monoclonal gammopathy and monoclonal gammopathy of undetermined significance, MGUS), peripheral neuropathy, paraneoplastic syndrome, channelopathies such as epilepsy, migraine, arrhythmia, muscular disorders, deafness, blindness, periodic paralysis, and channelopathies of the CNS, autism, inflammatory myopathy, focal or segmental or focal segmental glomerulosclerosis (FSGS), endocrine ophthalmopathy, uveoretinitis, chorioretinitis, autoimmune hepatological disorder, fibromyalgia, multiple endocrine failure, Schmidt's syndrome, adrenalitis, gastric atrophy, presenile dementia, demyelinating diseases such as autoimmune demyelinating diseases and chronic inflammatory demyelinating polyneuropathy, Dressler's syndrome, alopecia areata, alopecia totalis, CREST syndrome (calcinosis, Raynaud's phenomenon, esophageal dysmotility, sclerodactyly, and telangiectasia), male and female autoimmune infertility, e.g., due to anti-spermatozoan antibodies, mixed connective tissue disease, Chagas' disease, rheumatic fever, recurrent abortion, farmer's lung, erythema multiforme, post-cardiotomy syndrome, Cushing's syndrome, bird-fancier's lung, allergic granulomatous angiitis, benign lymphocytic angiitis, Alport's syndrome, alveolitis such as allergic alveolitis and fibrosing alveolitis, interstitial lung disease, transfusion reaction, leprosy, malaria, parasitic diseases such as leishmaniasis, kypanosomiasis, schistosomiasis, ascariasis, aspergillosis, Sampter's syndrome, Caplan's syndrome, dengue, endocarditis, endomyocardial fibrosis, diffuse interstitial pulmonary fibrosis, interstitial lung fibrosis, fibrosing mediastinitis, pulmonary fibrosis, idiopathic pulmonary fibrosis, cystic fibrosis, endophthalmitis, erythema elevatum et diutinum, erythroblastosis fetalis, eosinophilic faciitis, Shulman's syndrome, Felty's syndrome, flariasis, cyclitis such as chronic cyclitis, heterochronic cyclitis, iridocyclitis (acute or chronic), or Fuch's cyclitis, Henoch-Schonlein purpura, human immunodeficiency virus (HIV) infection, SCID, acquired immune deficiency syndrome (AIDS), echovirus infection, sepsis (systemic inflammatory response syndrome (SIRS)), endotoxemia, pancreatitis, thyroxicosis, parvovirus infection, rubella virus infection, post-vaccination syndromes, congenital rubella infection, Epstein-Barr virus infection, mumps, Evan's syndrome, autoimmune gonadal failure, Sydenham's chorea, post-streptococcal nephritis, thromboangitis ubiterans, thyrotoxicosis, tabes dorsalis, chorioiditis, giant-cell polymyalgia, chronic hypersensitivity pneumonitis, conjunctivitis, such as vernal catarrh, keratoconjunctivitis sicca, and epidemic keratoconjunctivitis, idiopathic nephritic syndrome, minimal change nephropathy, benign familial and ischemia-reperfusion injury, transplant organ reperfusion, retinal autoimmunity, joint inflammation, bronchitis, chronic obstructive airway/pulmonary disease, silicosis, aphthae, aphthous stomatitis, arteriosclerotic disorders (cerebral vascular insufficiency) such as arteriosclerotic encephalopathy and arteriosclerotic retinopathy, aspermiogenese, autoimmune hemolysis, Boeck's disease, cryoglobulinemia, Dupuytren's contracture, endophthalmia phacoanaphylactica, enteritis allergica, erythema nodosum leprosum, idiopathic facial paralysis, chronic fatigue syndrome, febris rheumatica, Hamman-Rich's disease, sensoneural hearing loss, haemoglobinuria paroxysmatica, hypogonadism, ileitis regionalis, leucopenia, mononucleosis infectiosa, traverse myelitis, primary idiopathic myxedema, nephrosis, ophthalmia symphatica (sympathetic ophthalmitis), neonatal ophthalmitis, optic neuritis, orchitis granulomatosa, pancreatitis, polyradiculitis acuta, pyoderma gangrenosum, Quervain's thyreoiditis, acquired spenic atrophy, non-malignant thymoma, lymphofollicular thymitis, vitiligo, toxic-shock syndrome, food poisoning, conditions involving infiltration of T cells, leukocyte-adhesion deficiency, immune responses associated with acute and delayed hypersensitivity mediated by cytokines and T-lymphocytes, diseases involving leukocyte diapedesis, multiple organ injury syndrome, antigen-antibody complex-mediated diseases, antiglomerular basement membrane disease, autoimmune polyendocrinopathies, oophoritis, primary myxedema, autoimmune atrophic gastritis, rheumatic diseases, mixed connective tissue disease, nephrotic syndrome, insulitis, polyendocrine failure, autoimmune polyglandular syndromes, including polyglandular syndrome type I, adult-onset idiopathic hypoparathyroidism (AOIH), cardiomyopathy such as dilated cardiomyopathy, epidermolisis bullosa acquisita (EBA), hemochromatosis, myocarditis, nephrotic syndrome, primary sclerosing cholangitis, purulent or nonpurulent sinusitis, acute or chronic sinusitis, ethmoid, frontal, maxillary, or sphenoid sinusitis, allergic sinusitis, an eosinophil-related disorder such as eosinophilia, pulmonary infiltration eosinophilia, eosinophilia-myalgia syndrome, Loffler's syndrome, chronic eosinophilic pneumonia, tropical pulmonary eosinophilia, bronchopneumonic aspergillosis, aspergilloma, or granulomas containing eosinophils, anaphylaxis, spondyloarthropathies, seronegative spondyloarthritides, polyendocrine autoimmune disease, sclerosing cholangitis, sclera, episclera, chronic mucocutaneous candidiasis, Bruton's syndrome, transient hypogammaglobulinemia of infancy, Wiskott-Aldrich syndrome, ataxia telangiectasia syndrome, angiectasis, autoimmune disorders associated with collagen disease, rheumatism such as chronic arthrorheumatism, lymphadenitis, reduction in blood pressure response, vascular dysfunction, tissue injury, cardiovascular ischemia, hyperalgesia, renal ischemia, cerebral ischemia, and disease accompanying vascularization, allergic hypersensitivity disorders, glomerulonephritides, reperfusion injury, ischemic re-perfusion disorder, reperfusion injury of myocardial or other tissues, lymphomatous tracheobronchitis, inflammatory dermatoses, dermatoses with acute inflammatory components, multiple organ failure, bullous diseases, renal cortical necrosis, acute purulent meningitis or other central nervous system inflammatory disorders, ocular and orbital inflammatory disorders, granulocyte transfusion-associated syndromes, cytokine-induced toxicity, narcolepsy, acute serious inflammation, chronic intractable inflammation, pyelitis, endarterial hyperplasia, peptic ulcer, valvulitis, and endometriosis

[0311] The “colonization” of a host organism includes the non-transitory residence of a bacterium or other microscopic organism. In the case of treatment, the host is generally referred to herein as a “subject”, typically a human or other mammal. As used herein, “reducing colonization” of a host subject's gastrointestinal tract (or any other microbiotal niche) by a pathogenic bacterium includes a reduction in the residence time of the pathogen in the gastrointestinal tract as well as a reduction in the number (or concentration) of the pathogen in the gastrointestinal tract or adhered to the luminal surface of the gastrointestinal tract. Measuring reductions of adherent pathogens can be demonstrated, e.g., by a biopsy sample, or reductions can be measured indirectly, e.g., by measuring the pathogenic burden in the stool of a mammalian host.

[0312] A “combination” of two or more bacteria includes the physical co-existence of the two bacteria, either in the same material or product or in physically connected products, as well as the temporal co-administration or co-localization of the two bacteria.

[0313] A “cytotoxic” activity or bacterium includes the ability to kill a bacterial cell, such as a pathogenic bacterial cell. A “cytostatic” activity or bacterium includes the ability to inhibit, partially or fully, growth, metabolism, and/or proliferation of a bacterial cell, such as a pathogenic bacterial cell.

[0314] To be free of “non-comestible products” means that a bacterial composition or other material provided herein does not have a substantial amount of a non-comestible product, e.g., a product or material that is inedible, harmful or otherwise undesired in a product suitable for administration, e.g., oral administration, to a human subject. Non-comestible products are often found in preparations of bacteria from the prior art.

[0315] A “biologically pure culture” is a culture a culture of bacteria in a medium in which only selected viable species are present and no other viable species of microorganisms are detected.

[0316] For nucleic acids, the term “substantial homology” indicates that two nucleic acids, or designated sequences thereof, when optimally aligned and compared, are identical, with appropriate nucleotide insertions or deletions, in at least about 80% of the nucleotides, at least about 90% to 95%, or at least about 98% to 99.5% of the nucleotides. Alternatively, substantial homology exists when the segments will hybridize under selective hybridization conditions, to the complement of the strand.

[0317] For polypeptides, the term “substantial homology” indicates that two polypeptides, or designated sequences thereof, when optimally aligned and compared, are identical, with appropriate amino acid insertions or deletions, in at least about 80% of the amino acids, at least about 90% to 95%, or at least about 98% to 99.5% of the amino acids.

[0318] The percent identity between two sequences is a function of the number of identical positions shared by the sequences (i.e., % homology=# of identical positions/total # of positions×100), taking into account the number of gaps, and the length of each gap, which need to be introduced for optimal alignment of the two sequences. The comparison of sequences and determination of percent identity between two sequences can be accomplished using a mathematical algorithm, as described in the non-limiting examples below.

[0319] The percent identity between two nucleotide sequences can be determined using the GAP program in the GCG software package (available at worldwideweb.gcg.com), using a NWSgapdna.CMP matrix and a gap weight of 40, 50, 60, 70, or 80 and a length weight of 1, 2, 3, 4, 5, or 6. The percent identity between two nucleotide or amino acid sequences can also be determined using the algorithm of E. Meyers and W. Miller (CABIOS, 4: 11-17 (1989)) which has been incorporated into the ALIGN program (version 2.0), using a PAM120 weight residue table, a gap length penalty of 12 and a gap penalty of 4. In addition, the percent identity between two amino acid sequences can be determined using the Needleman and Wunsch (J. Mol. Biol. (48):444-453 (1970)) algorithm which has been incorporated into the GAP program in the GCG software package (available at worldwideweb.gcg.com), using either a Blossum 62 matrix or a PAM250 matrix, and a gap weight of 16, 14, 12, 10, 8, 6, or 4 and a length weight of 1, 2, 3, 4, 5, or 6.

[0320] The nucleic acid and protein sequences described herein can further be used as a “query sequence” to perform a search against public databases to, for example, identify related sequences. Such searches can be performed using the NBLAST and XBLAST programs (version 2.0) of Altschul, et al. (1990) J. Mol. Biol. 215:403-10. BLAST nucleotide searches can be performed with the NBLAST program, score=100, wordlength=12 to obtain nucleotide sequences homologous to the nucleic acid molecules described herein. BLAST protein searches can be performed with the XBLAST program, score=50, wordlength=3 to obtain amino acid sequences homologous to the protein molecules described herein. To obtain gapped alignments for comparison purposes, Gapped BLAST can be utilized as described in Altschul et al., (1997) Nucleic Acids Res. 25(17):3389-3402. When utilizing BLAST and Gapped BLAST programs, the default parameters of the respective programs (e.g., XBLAST and NBLAST) can be used. See worldwideweb.ncbi.nlm.nih.gov. Other methods of determining identity that are known in the art can be used.

[0321] The term “patient” includes human and other mammalian subjects that receive either prophylactic or therapeutic treatment.

[0322] As used herein, the term “subject” includes any human or non-human animal. For example, the methods and compositions described herein can be used to treat a subject having cancer. The term “non-human animal” includes all vertebrates, e.g., mammals and non-mammals, such as non-human primates, sheep, dog, cow, chickens, amphibians, reptiles, etc.

[0323] As used herein, the terms “ug” and “uM” are used interchangeably with “μg” and “μM,” respectively.

[0324] Various aspects described herein are described in further detail throughout the specification.

[0325] Unless otherwise indicated, all numbers expressing quantities of ingredients, reaction conditions, and so forth used in the specification, including claims, are to be understood as being modified in all instances by the term “about.” Accordingly, unless otherwise indicated to the contrary, the numerical parameters are approximations and can vary depending upon the desired properties sought to be obtained. At the very least, and not as an attempt to limit the application of the doctrine of equivalents to the scope of the claims, each numerical parameter should be construed in light of the number of significant digits and ordinary rounding approaches.

[0326] The following examples are offered by way of illustration and not by way of limitation. The contents of all references cited throughout this application are expressly incorporated herein by reference.

### EXAMPLES

### Example 1: Effect of Administration of a Spore Preparation (an HHSP) on Clinical Efficacy in Ulcerative Colitis Patients

[0327] A Phase 1b multicenter, randomized, double-blind, placebo-controlled multiple dose study (ClinicalTrials.gov Identifier: NCT02618187) was conducted to evaluate the safety and tolerability of a composition comprising purified spore population derived from the feces of healthy human donors (HHSP) for the treatment of mild to moderate ulcerative colitis in patients who had failed standard-of-care. Specific inclusion/exclusion criteria are available at worldwideweb.clinicaltrials.gov/ct2/show/NCT02618187?term=SERES-101&rank=1.

[0328] Briefly, 58 mild to moderate UC subjects (Mayo score 4-10) were randomly assigned to one of four 8-week induction treatment arms preceded by a 6-day pretreatment phase as follows: Arm A) placebo/placebo (n=11); Arm B) placebo/weekly HHSP (n=15); Arm C) vancomycin (vanco)/HHSP weekly (qwk) (n=17); or Arm D) vanco/HHSP daily (qD) (n=15). Clinical efficacy (i.e., improvement of ulcerative colitis) was determined based on one or more of the following criteria: (i) clinical remission (Total Modified Mayo (TMM) score of ≤2 plus endoscopic subscore of ≤1); and (ii) endoscopic improvement (decrease in endoscopic score of ≥1).

[0329] The patient characteristics at baseline is provided in Table 1, below.

TABLE 1
Baseline Characteristics

| | | | |
|---|---|---|---|
| | Arm B | Arm C | Arm D |
| Arm A | (Placebo/ | (Vanco/ | (Vanco/ |
| (Placebo/ | HHSP | HHSP | HHSP |
| Placebo) | Weekly) | Weekly) | Daily) |
| (n = 11) | (n = 15) | (n = 17) | (n = 15) |

| | | | | |
|---|---|---|---|---|
| Average Mayo | 7.3 | 6.8 | 6.4 | 6.99 |
| Score (Baseline) | | | | |
| Mild (n) | 3 (27%) | 6 (40%) | 10 (59%) | 6 (40%) |
| Moderate (n) | 8 (73%) | 9 (60%) | 7 (41%) | 9 (60%) |

Endoscopy Score at Baseline

| | | | | |
|---|---|---|---|---|
| Score = 1 | 1 (9%) | 3 (20%) | 5 (29%) | 3 (20%) |
| Score = 2 | 5 (45%) | 7 (47%) | 7 (41%) | 9 (60%) |
| Score = 3 | 5 (45%) | 5 (33%) | 5 (29%) | 3 (20%) |

### Clinical Remission and Endoscopic Healing

[0330] All treatment arms compared to Placebo (Arm A) resulted in increased clinical remission in patients, demonstrating that an HHSP can be used to treat ulcerative colitis. The greatest impact on remission was observed in Arm D (FIG. 1, left graph, vanco/HHSP daily) with approximately 40% of the patients going into remission. In Arm B (i.e., placebo/HHSP weekly) and Arm C (i.e., vanco/HHSP weekly), approximately 13.3% and 17.7% of the patients went into remission, respectively. Similarly, all treatment arms resulted in endoscopic improvement above the rate observed in Placebo; a higher percentage of patients that received the daily administration of HHSP (Arm D, 40%) exhibited endoscopic improvement compared to patients that received placebo alone (Arm A, 9.1%) or weekly administration of an HHSP (Arms B and C, 33.3% and 23.5%, respectively). (FIG. 1, right graph).

[0331] These data demonstrate that a spore composition derived from the feces of a healthy human can be used to ameliorate ulcerative colitis and that the parameters of clinical remission and endoscopic improvement can be used to evaluate the efficacy of a microbiome composition for treating ulcerative colitis. These data also demonstrate that a ‘complete’ microbiome as provided by FMT, is not necessary to effectively ameliorate UC.

### Long-Term Clinical Remission

[0332] To determine the long-term clinical efficacy of HHSP administration on ulcerative colitis, patients who were in remission at the end of the 8-week induction treatment period, treated patients in remission were followed for an additional 26 weeks and the number of remitters with a flare-up of disease was determined. The continuity of remission after inducing remission in a subject is termed “maintenance.”

[0333] As shown in Table 2 below, none of the remitters had a UC flare-up during the 26-week period. This was true regardless of whether the patients had received HHSP weekly (Arms B and C) or daily (Arm D).

[0334] These data demonstrate that a microbiome composition, e.g., an HHSP, can evoke a durable effect on remission.

TABLE 2
Number of Remitting Subjects with UC Flare-Up

| | | Arm B | Arm C | Arm D |
|---|---|---|---|---|
| | Arm A | (Placebo/ | (Vanco/ | (Vanco/ |
| | (Placebo/ | HHSP | HHSP | HHSP |
| | Placebo) | Weekly) | Weekly) | Daily) |
| | (n =2) | (n =0) | (n =3) | (n =6) |
| Number of | N/A | 0 | 0 | 0 |
| Remitters with | | | | |
| Flare-Up | | | | |

### Adverse Events

[0335] As part of the clinical trial protocol, adverse events were recorded and assessed at the end of the 8 week induction period. In general, patients treated with an HHSP had fewer gastrointestinal-related adverse events compared to the placebo control. The most significant difference was observed in patients that received HHSP daily (Arm D), which is consistent with a dosage-dependent effect of an HHSP.

[0336] The low level of adverse events associated with treatment with a microbiome composition demonstrated that a microbiome composition comprising a purified spore population derived from the feces of healthy human donors can safely be used to treat ulcerative colitis, including mild to moderate UC. The greatest difference in the adverse events between placebo and treated subjects was in the category of GI disorders (45.5% in placebo arm vs. 13.3% in daily treatment arm). This difference was most prominent in patients who received daily administration of the purified spore population (45.5% in placebo vs. 13.3% in Arm D).

### Example 2: Engraftment and/or Augmentation in Ulcerative Colitis Patients Treated with a Spore Preparation (HHSP)

[0337] As described in Example 1, treatment of an HHSP was able to provide a durable treatment effect in UC patients. One potential advantage of a microbiome composition for treating disease is that the microbiome composition may provide a durable effect because at least some beneficial species of the microbiome composition can engraft in the treated subject, thereby providing an ongoing source of beneficial functions and may facilitate the proliferation of advantageous bacteria not in the composition (augmentation). Not only is the lack of a durable effect an issue with pharmaceuticals that must be dosed regularly to achieve therapeutic levels, it has been noted that many probiotics must be taken with high frequency to maintain a therapeutic effect (Walter J., et al., Curr Opin Biotechnol 49: 129-139, 2018). The ability to engraft is therefore a desirable feature for bacteria in a microbiome composition, enabling, among other features, less frequent dosing than may be required with a pharmaceutical or non-engrafting probiotic. A second novel feature of certain microbiome compositions is enhancement of beneficial bacterial species not detectable or present in low levels in a patient prior to treatment with a microbiome composition.

[0338] Applicants have identified specific OTUs or species that engraft or augment and are also associated with remission. Such OTUs or species are useful in designed compositions for treating and IBD, e.g., ulcerative colitis.

[0339] To determine whether a microbiome composition can engraft and/or augment, complementary genomic methods were used to characterize the microbiota of ulcerative colitis patients at pretreatment (baseline) and up to 12 weeks post initial treatment with an HHSP (i.e., up to four weeks after the last treatment with an HHSP). The fecal microbiomes of UC subjects and HHSP doses were characterized using Whole Genome Shotgun Sequencing (WGS). WGS is a high-resolution method widely used and reported in the literature (e.g., Lloyd-Price et al., Nature 550:61-66, 2017) that enables species-level taxonomic identifications (Truong et al. Nature Meth 12:203-209, 2015). The relative abundance of species present in the fecal samples and the HHSP was obtained using the open-source software MetaPhlAn2 (ver 2.6.0) coupled with a proprietary internal database update. For analyses of engraftment, the set of species identified by MetaPhlAn2 in UC patients and HHSP was filtered against a proprietary, curated database of spore-forming species.

[0340] As shown in FIG. 2A, an analysis of the number of engrafting species identified in an HHSP showed that engraftment of HHSP species occurred as early as 1 week after the initial dose of an HHSP in all treatment arms (i.e., Arms B, C, and D) compared to the placebo control (Arm A). Determinations of engraftment were made based on assessing the presence or absence of spore forming bacterial species in the HHSP in a subject's stool after the initiation of treatment. Engraftment was greater in patients that were pretreated with vancomycin (e.g., Arm B v. Arm C). The highest engraftment was observed in patients that were pre-treated with vancomycin and then, received HHSP daily. Engraftment was also durable for at least 4 weeks after the final HHSP administration (see 56 days and 84 days in FIG. 2A). Interestingly, as shown in FIGS. 2B and 2C, the engrafting species could be further divided into those that were long-term engrafters (FIG. 2B) and those that were transient engrafters (FIG. 2C). The classification of a species into long-term versus transient engrafters was determined based on the identification of two distinct clusters of co-occurring engrafting species across patient samples. Transient engrafters (TE) peaked in engraftment 1-2 weeks after the start of dosing with HHSP, and show similar engraftment profiles in Arm C and Arm D. Long-term engrafters (LTE) showed a dose-dependent response at early time points and remained durably in patients at least 4 weeks beyond administration of the last dose (Visit 13). Table 5 provides a list of different bacterial species that were identified to be either a long-term engrafter or a transient engrafter. Importantly, many species that were present in HHSP did not engraft at detectable levels, showing that engraftment is not a universal property of species in HHSP.

[0341] This engraftment data reflects the requirements to disrupt a stable yet dysbiotic microbiome in UC patients. Across many ecological systems, communities are stable except when they experience a strong disruption. Here, vancomycin pretreatment is required to disrupt the existing UC microbiome and open a niche for engraftment of HHSP bacteria. After disruption of an ecological system, a succession of communities often appear before a final stable climax community is reached. Intermediate communities, referred to as seral communities (or seres), are often necessary to change the environment enabling establishment of subsequent communities. After the disruption of the UC microbiome with vancomycin, TE species form a seral community that is followed by establishment of LTE species, which form the stable climax community. Thus, durable therapeutic intervention can require administration of both TE and LTE species (after disrupting the existing community with vancomycin); TE and LTE species can play distinct roles that are both required to alter the environment of the gastrointestinal tract in UC.

[0342] Supporting the distinct role of TE and LTE species, comparative genomic analysis of these two groups of species showed that they were functionally distinct. For example, pathways for oxygen and reactive oxygen species metabolism were enriched in TE species, including catalase, superoxide dismutase, osmoprotectant transport systems, and superoxide reductace. As reactive oxygen species are produced by the host during inflammation, this can be an important feature for early engraftment of TE species in an inflamed gut. Removal of reactive oxygen species by TE species can enable subsequent engraftment of LTE species.

### Example 3: Effect of Treatment on Microbiome of Ulcerative Colitis Patients

[0343] To determine whether the increased engraftment had any effect on the microbiome of the ulcerative colitis patients, the spore former composition of the treated patients' microbiomes was compared to baseline (i.e., pre-HHSP administration) at various time points after the initial HHSP administration. Specifically, the binary-Jaccard distances between the spore-forming fraction of subject microbiomes and pooled HHSP dose species content were calculated for all arms at all time points sampled. The Binary Jaccard distance ranges between −1 and 1, with 0 indicating samples sharing the exact same set of species, and 1 indicating samples that have no species in common. The abundance of species is not considered in calculations of the metric. A higher value for the similarity metric indicates greater similarity between subject microbiomes and HHSP.

[0344] As shown in FIG. 3, at the end of the 8-week induction therapy treatment, the spore former portion of the microbiome of patients from Arms C (vancomycin pre-treatment/HHSP weekly) and D (vancomycin pre-treatment/HHSP daily) were more similar to that of the HHSP composition than to the baseline. As observed with clinical efficacy (see Example 1), the effect was more profound in patients that were pre-treated with vancomycin and daily dose of an HHSP (Arm D), compared to the other treatment arms.

### Example 4: Association of Microbiome Change with Clinical Outcome

[0345] Treatment with an HHSP composition changed both the spore former and non-spore former portion of the microbiome in remitters and non-remitters. Further analyses were conducted to determine whether specific species of bacteria were associated with clinical remission observed in the clinical trial subjects. Taxonomic profiles of subject fecal microbiomes and HHSP obtained with a MetaPhlAn database (as described supra) were used to identify species associated with clinical outcome in Arm D, using bootstrapped lasso logistic regression.

[0346] Applicants found that as early as 7 days after the initial HHSP dosing, there was a clear distinction in the prevalence of certain bacterial species present in patients in remission (remitters) and patients that were not in remission (non-remitters). This distinction persisted for at least 4 weeks after the end of the treatment period, consistent with the observation of durability of treatment effect (maintenance) associated with HHSP treatment.

[0347] In total, 31 different bacterial species were identified as predictive of clinical outcome. The identified species included species that were present in at least some HHSP compositions, as well as those that were augmented by treatment (i.e., either were not present in the HHSP composition or were present at concentrations below the limit of detection). Twenty of the species were associated with remission and 11 were associated with non-remission. Table 3 provides the SEQ ID NOs for a 16S rDNA sequence of the 31 identified bacterial species, along with the name of a reference species having a 16S rDNA sequence with at least 99% sequence identity.

TABLE 3
Bacterial Species Associated with Clinical Outcome

| | Associated | | Reference Strain with | SEQ ID NO |
|---|---|---|---|---|
| | Clinical | Engrafter or | ≥99% 16S | for 16S rDNA |
| Species | Outcome | Augmenter | rDNA full length match | sequence |
| Parasutterella | Remitter | Augment (non- | Parasutterella | 68 |
| excrementihominis | | spore former) | excrementihominis | |
| | | | strain YIT 11859 | |
| Coprobacillus | Remitter | Engrafter | None | 47 |
| unclassified | | | | |
| Holdemania | Remitter | Engrafter | Holdemania filiformis | 66, 67 |
| unclassified | | | strain JI-31B-1, | |
| | | | Holdemania | |
| | | | massiliensis strain | |
| | | | AP2 | |
| Bacteroides ovatus | Remitter | Augment (non- | Bacteroides ovatus | 19-22 |
| | | spore former) | strain JCM 5824 | |
| Akkermansia | Remitter | Augment (non- | Akkermansia | 16-18 |
| muciniphila | | spore former) | muciniphila strain | |
| | | | ATCC BAA-835 | |
| Clostridium leptum | Remitter | Engrafter | Clostridiumleptum | 44, 45 |
| | | | strain DSM 753 | |
| Roseburia unclassified | Remitter | Engrafter | None | 76 |
| Lachnospiraceae | Remitter | Engrafter | None | 49 |
| unclassified | | | | |
| Bilophila unclassified | Remitter | Augment (non- | Bilophila | 32-36 |
| | | spore former) | wadsworthia 3 1 6 | |
| Lachnospiraceae | Remitter | Engrafter | None | 50 |
| unclassified | | | | |
| Dielma fastidiosa | Remitter | Engrafter | Dielma fastidiosa | 39 |
| | | | strain JC13 | |
| Roseburia hominis | Remitter | Engrafter | Roseburia hominis | 72-75 |
| | | | strain A2-183 | |
| Clostridium | Remitter | Engrafter | Clostridium | 51 |
| symbiosum | | | symbiosum strain | |
| | | | ATCC 14940 | |
| Eubacterium siraeum | Remitter | Engrafter | Eubacterium | 59-62 |
| | | | siraeum strain ATCC | |
| | | | 29066 | |
| Butyricicoccus | Remitter | Engrafter | None | 48 |
| unclassified | | | | |
| Bacteroides vulgatus | Remitter | Augment (non- | Bacteroides vulgatus | 23-30 |
| | | spore former) | strain JCM 5826 | |
| Clostridium bolteae | Remitter | Engrafter | Clostridium | 41 |
| | | | bolteae strain JCM | |
| | | | 12243 | |
| Ruminococcaceae | Remitter | Engrafter | None | 64 |
| unclassified | | | | |
| Subdoligranulum | Remitter | Engrafter | None | 65 |
| unclassified | | | | |
| Clostridium innocuum | Remitter | Engrafter | Clostridium innocuum | |
| | | | B-3 ATCC 14501 | |
| Lachnospiraceae | Non- | Engrafter | None | 15 |
| unclassified | Remitter | | | |
| Lachnospiraceae | Non- | Engrafter | None | 83 |
| unclassified | Remitter | | | |
| Prevotella copri | Non- | Augment (non- | Prevotella copri | 69-71 |
| | Remitter | spore former) | strain JCM 13464 | |
| Faecalicatena contorta | Non- | Engrafter | Eubacterium | 55-58 |
| | Remitter | | contortum strain | |
| | | | DSM 3982 | |
| Dialister invisus | Non- | Augment (non- | Dialister invisus | 52-54 |
| | Remitter | spore former) | strain E7.25 | |
| Clostridiales | Non- | Engrafter | None | 37, 38 |
| unclassified | Remitter | | | |
| Ruminococcus gnavus | Non- | Engrafter | Ruminococcus | 77-82 |
| | Remitter | | gnavus strain ATCC | |
| | | | 29149 | |
| Erysipelatoclostridium | Non- | Engrafter | Erysipelatoclostridium | 46 |
| ramosum | Remitter | | ramosum strain | |
| | | | JCM 1298 | |
| Veillonella | Non- | Augment (non- | Veillonella atypica | 84-101 |
| unclassified | Remitter | spore former) | strain KON; | |
| | | | Veillonella dispar | |
| | | | strain ATCC | |
| | | | 17748; Veillonella | |
| | | | parvula strain ATCC | |
| | | | 10790; Veillonella | |
| | | | ratti strain JCM | |
| | | | 6512; Veillonella | |
| | | | criceti strain JCM | |
| | | | 6511 | |
| Hungatella effluvii | Non- | Engrafter | Clostridium | 42, 43 |
| | Remitter | | hathewayi strain | |
| | | | 1313 | |
| Bifidobacterium | Non- | Augment (non- | Bifidobacterium | 31 |
| dentium | Remitter | spore former) | dentium strain B764 | |

[0348] Bacterial species in Table 3 that are associated with remission are useful in DEs. Accordingly, in some embodiments of the invention, a microbiome composition comprises at least one of the remitter-associated species identified in Table 3 or a species that has a16S rDNA that has at least 9700 identity to a remitter-associated species. In some cases, the microbiome composition is an HHSP. In other cases, the microbiome composition is a DE. In general, if the composition is a DE, is does not include a bacterium associated with non-remission.

[0349] In some embodiments, an HHSP or material used in the manufacture of a spore composition is tested for one or more species associated with non-remission. Presence of such species may be used as a criterion for excluding the HHSP or material in a microbiome composition. In some embodiments, an HHSP or material used in the manufacture of a spore composition is tested for the presence of bacterial species associated with remission and the presence of one or more of such species is a criterion for using the HHSP or material in microbiome composition.

### Example 5: Metabolomic Analyses

[0350] It is known in the art that multiple bacterial species may be able to carry out similar functions. Applicants posited that by identifying key functions of bacteria associated with remission, compositions can be designed that include bacteria having such functions using bacteria identified as associated with remission in Table 3 and/or bacterial species not identified in Table 3 but otherwise demonstrated to have one or more identified functions. Accordingly, Applicants further characterized the metabolic signatures of bacteria associated with clinical remission and non-remission in patients from all the treatment Arms. Their correlations with the identified bacterial species was determined as described below.

[0351] All methods utilized a Waters ACQUITY Ultra Performance liquid chromatography (UPLC®) and a Thermo Scientific Q-Exactive™ high resolution/accurate mass spectrometer interfaced with a heated electrospray ionization (HESI-II) source and Orbitrap mass analyzer operated at 35,000 mass resolution. Four different combinations of ionic and chromatographically optimized conditions were used to capture a variety of hydrophilic and hydrophobic compounds.

[0352] The MS analysis alternated between MS and data-dependent MSn scans using dynamic exclusion. The scan range varied slighted between methods but covered 70-1000 m/z.

[0353] Metabolites were identified by comparison to library entries of purified standards based on the retention time/index (RI), mass to charge ratio (m/z), and chromatographic data (including MS/MS spectral data). While there can be similarities between these molecules based on one of these factors, the use of all three data points can be utilized to distinguish and differentiate biochemicals. Peaks were quantified using area-under-the-curve.

[0354] The results of these analyses demonstrated a strong correlation between species associated with clinical outcome and certain metabolites. For instance, as shown in FIG. 4, ulcerative colitis patients (regardless of treatment arm) who went into remission had significantly higher levels of 7-α-dehydroxylated secondary bile acids in their fecal sample, compared to those patients who did not go into clinical remission. Two such secondary bile acids (deoxycholic acid and lithocholic acid) were able to not only decrease TNF-α production but also increase IL-10 production by the LPS-stimulated PBMCs. See FIGS. 5A and 5B, respectively. Other non-limiting examples of metabolites associated with clinical outcome included the following: (i) tryptophan-derived metabolites (e.g., indole and 3-methylindole), (ii) medium-chain fatty acids, (iii) endocannabinoids, (iv) sphingolipids, and (v) kynurenine. Surprisingly, certain SCFAs were negatively associated with remission. The strong correlation appeared to suggest that these species may mediate the activity of key metabolites that are associated with clinical outcome. The metabolomics signature of clinical remission included many diverse functional pathways, with many implicated in inflammatory bowel disease, e.g., ulcerative colitis.

Correlation of Metabolites with Clinical Outcome

[0355] To confirm the above identified correlation between species and certain metabolites, the level of selected identified metabolites (i.e., selected tryptophan metabolites (indole and 3-methylindole)) were compared between remitters and non-responders from all treatment arms of the clinical trial (Arms B, C, and D) at the end of the 8-week treatment period.

[0356] Standard analysis of paired taxonomic and metabolomic profiles generally involves pairwise correlation (e.g., Spearman or Pearson correlation) between species and metabolite abundance to identify those species whose abundance is correlated with the abundance of metabolites. This type of correlational analysis typically results in large groups of species being correlated with large groups of metabolites, as has been seen in both cohort and interventional studies. This means that this type of standard correlational analysis does not adequately identify those species truly mechanistically involved in a selected metabolic function.

[0357] To address the inadequacy of standard correlational analyses, Applicants used a novel approach to identify specific species-metabolite relationships in paired taxonomic and metabolomic profiles. Computational analyses were performed analyzing the relationship between (i) the presence and level of different metabolites and (ii) the presence of individual bacterial species and combinations of bacterial species. In addition, analyses were performed assessing the relative abundance of a bacterial species and a metabolite.

[0358] As shown in FIGS. 6A and 6B, ulcerative colitis patients who went into remission after HHSP administration had higher levels of both indole and 3-methylindole, suggesting a positive correlation between increased levels of these tryptophan metabolites and clinical remission. FIG. 6C explains the large variability seen for 3-methylindole (FIG. 6B). Increased tryptophan metabolite levels were associated with two bacterial species identified in HHSP compositions: Ruminococcus bromii and Eubacterium siraeum. Therefore, the variability in 3-methylindole levels seen in FIG. 6B may be due to some ulcerative colitis patients having zero, one, or both of these two bacterial species in their GI microbiome. For example, as shown in FIG. 6C, patients who had both bacterial species in their microbiome had a higher 3-methylindole level and higher rates of clinical remission compared to those who did not harbor these species. These data also indicate that in some embodiments, inclusion of R. bromii and/or E. siraeum in a microbiome composition is advantageous e.g., for inducing and/or maintaining remission. Further, inclusion of one or both species is useful for increasing production of 3-methylindole in a treated subject.

[0359] AhR activation is reportedly associated with strengthening of the intestinal epithelial barrier and mucosal homeostasis in the intestine by inducing broad changes in gene expression. As shown in FIG. 7A, indole and 3-methylindole, which were associated with clinical efficacy of a microbiome composition in ulcerative colitis patients as well as other related metabolites (e.g., 3-indole acetic acid and indoleacrylate) induced AhR-mediated cyp1a1 expression in intestinal epithelial organoids. An increase in Cyp1a1 expression is considered to be a specific measure of AhR-mediated gene expression. The increase in cyp1a1 expression also occurred when the epithelial organoids were treated with supernatants of bacteria known to produce the above metabolites. See FIG. 7B. In addition to tryptophan metabolites, the bacterial supernatants also contained a variety of SCFAs, MCFAs, and BCFAs and SCFAs are reported to enhance expression of AhR-responsive genes indicating that the combination of both classes of metabolites could enhance the protective effects of bacterial strains (Jin U. H., et al., Sci Rep 7(10):10163 (2017)).

[0360] Accordingly, these results indicate that one mechanism by which the bacteria associated with HHSP effect an improvement in UC is by restoring epithelial barrier integrity through the modulation of metabolites that induce AhR-mediated cyp1a1 expression.

[0361] These data indicate that a composition comprising bacteria that can increase levels of certain tryptophan metabolites, e.g., including but not limited to indole and/or 3-methylindole, are useful for treating UC.

### Example 6: Barrier Integrity Analysis

[0362] As reported above, certain bacteria associated with remission of UC can produce particular tryptophan metabolites and those metabolites are associated with a more robust intestinal epithelial barrier and mucosal homeostasis. Disruption of normal barrier function due to destruction of tight junctions between epithelial cells and apoptosis induced by chronic inflammation is an important factor in the pathogenesis of inflammatory bowel disease. Mucosal healing and re-establishment of barrier integrity are associated with an improvement of ulcerative colitis (e.g., clinical remission), as well as with an improved patient outcome (Lee S. H., Intest Res 13:11-18, 2015). This effect was further investigated using several bacterial species and additional metabolites in assays assessing restoration of barrier integrity.

[0363] The assays were performed using a primary epithelial cell monolayer barrier integrity assay. As illustrated in FIG. 8A and FIG. 8B, the assay apparatus has an apical side and a basal side that are separated by a monolayer of epithelial cells on a permeable membrane. The addition of interferon-gamma (IFN-γ) disrupts the tight junctions of the epithelial monolayer and induces apoptosis of epithelial cells. The leakiness of the membrane can be assessed by adding FITC-dextran to the apical side of the apparatus and measuring how rapidly it can pass to the basolateral compartment. A leaky monolayer will allow FITC-dextran to the basal side of the apparatus more quickly than a monolayer with an intact monolayer.

[0364] Briefly, the barrier integrity assay was conducted as follows. Primary human colon organoid cultures established from isolated colon crypts were grown and expanded in Matrigel® (Corning) and 50% L-cell conditioned medium containing Wnt3a, R-spondin 3 and Noggin (L-WRN) as described by VanDussen et al. containing 10 uM Y-27632 and 10 uM SB43152 (Gut 64:911-920, 2015). Colon organoids were harvested and trypsinized into a suspension containing few cell clusters and seeded onto Matrigel coated transwell inserts (Corning) at a density of 100,000 cells per insert in 50% L-WRN medium supplemented with 10 μM Y-27632 (Millipore Sigma). Epithelial cell monolayers formed over 4-5 days in 50% L-WRN medium. These primarily stem cell population was differentiated into colonocytes by switching the culture medium to 5% L-WRN for 48 hours. After 24 hours of differentiation, specific SCFA or 5% bacterial culture supernatant treatments were added to apical interface in 100 μL of 5% L-WRN medium and 5-25 ng/ml INFγ (Peprotech), depending on the experiment, was added in 175 μL of 5% L-WRN medium to the basolateral interface and incubated for 48 hours at 37° C. After the 48 hour incubation, colonic epithelial monolayer permeability was assessed by adding 10 μL of 10 ng/ml FITC-Dextran (4 kDa, Sigma) to the apical interface, the organoids were incubated for 1 hour and then 100 μL of medium was collected from the basolateral compartment of each transwell and transferred to a 96 well plate for fluorescence detection.

[0365] As shown in FIG. 9A, starting at a concentration of about 5 mM, the addition of short-chain fatty acids (butyrate and propionate) or a tryptophan metabolite (3-indolepropionic acid; IPA) restored barrier integrity under these conditions. FIG. 9B demonstrates that the addition of certain bacterial species reportedly associated with clinical remission (e.g., Collinsella intestinalis) can also restore barrier integrity. FIG. 9B also shows that certain bacteria (e.g., Escherichia coli and Acidaminococcus sp. D21) can have a deleterious effect on epithelial barrier integrity. This demonstrates that selection of bacteria for treating an IBD can be based on functional features.

[0366] In general, these data demonstrate that bacteria associated with restoration of barrier integrity and/or produce certain metabolites associated with restoration of barrier integrity can be useful for the treatment of ulcerative colitis. Accordingly, such bacteria are useful in bacterial compositions for treating conditions associated with impaired GI barrier integrity such as an IBD. These data also indicate that certain bacteria, Escherichia sp. and Acidaminococcus sp., may not be desirable for inclusion in a microbiome composition for use in treating a condition for which impaired barrier integrity is a feature.

### Example 7: Assessment of Anti-Inflammatory Effects in an Animal Model of Ulcerative Colitis

[0367] To further assess the effects of a microbiome composition, including a designed composition, on clinical remission, an animal model of ulcerative colitis was used. Briefly, naïve T cells (CD4+CD45RBhigh) obtained from the spleens C57Bl/6 mice (Using RAG IBD Cell Separation Protocol), were adoptively transferred into RAGn12 mice. Ten days later, the mice were treated with antibiotics orally for five days to deplete their natural intestinal microflora. Starting at day 14 post T cell transfer, some of the mice received a total of 21 doses of a spore composition (SP) or a designed composition (DE1) using oral gavage. DE1 is a synthetic composition consisting of 14 bacterial species: Anaerotruncus colihominis, Blautia producta, Clostridium bolteae, Clostridium disporicum, Clostridium ghonii, Clostridium glycolicum, Clostridium innocuum, Clostridium lactatifermentans, Clostridium viride, Eubacterium sp. WAL 14571, Lachnospiraceae bacterium 3 1 57FA, Lachnospiraceae bacterium oral taxon F15, Lactonifactor longoviformis, and Ruminococcus lactaris. In all, the different experimental groups included the following: (i) naïve animals (no disease, i.e., no T cell transfer; n=5); (ii) untreated disease control (T cell transfer only; n=15); (iii) antibiotic-treated disease control (T cell transfer+antibiotic treatment only; n=15); (iv) HHSP treated (T cell transfer+antibiotic treatment+HHSP treatment; n=15); and (v) DE1 treated (T cell transfer+antibiotic treatment+SP treatment; n=15). FIG. 10 provides a schematic of the protocol.

[0368] As shown in FIG. 11, animals that received either an HHSP or DE1 had a significantly reduced pathology score compared to the untreated disease control animals and antibiotic only treated disease control animals. The pathology score was based on the summation of 4 individual parameters; inflammation, gland loss, erosion, and hyperplasia (scored 0-5, 0=normal, 5=severe). Nanostring gene expression data were generated using the nCounter Mouse Immunology Panel with isolated total RNA from mouse colon. RNA was isolated from colon tissue stored in RNAlater (ThermoFisher) at −80° C. using a Qiagen RNeasy Plus Mini Kit per the manufacturers protocol. cDNA was then generated from mouse total-RNA using Invitrogen™ SuperScript™ III First-Strand Synthesis System for subsequent RT-qPCR analysis.

[0369] These data demonstrate that a composition comprising spore-forming bacteria derived from feces of a healthy donor or a subset of spore-former species can be effective for treating UC.

[0370] The NanoString gene expression profiles of colon samples from the mice indicated differences in the expression of several genes among the different groups. The following genes were downregulated in animals treated with an HHSP compared to the disease control animals: (i) T cell activation (e.g., Ctla4, Il18rl, Cxcl10/11, Lilrb314, Ifng, Nos2), (ii) proinflammatory cytokines (e.g., Tnf, Il1b, Ifng), and (iii) innate immune cell recruitment or activation (e.g., Cxcl1, Cxcl3, Ccl2, Cxcr6, Ltb, Cybb). The following genes were upregulated in animals treated with the HHSP compared to the disease control animals: (i) inhibition of inflammation (e.g., C4 bp, Zeb, Cd109), and (ii) adhesion molecules (e.g., Ncam1, Cd34/36, Fn1, Cdh5, Tjp1, Tjp2, and Ocln). The decrease in the expression level of the proinflammatory cytokine genes Il1b (FIG. 12A), Tnfa (FIG. 12B), and the increase in the expression of the adhesion molecule genes Tjp1 (FIG. 12C), Tjp2 (FIG. 12D), and Ocln (FIG. 12E) were further confirmed by qPCR and/or ELISA. RT-qPCR based gene expression data was generated using Applied Biosystems™ TaqMan™ Fast Advanced Master Mix on Applied Biosystems QuantStudio 7 Flex System.

[0371] Without committing to any specific theory, the above data suggest that such bacteria can treat ulcerative colitis through multiple pathways, such as by altering the patient's microbiota, modulating the production of various biological molecules (e.g., fecal calprotectin, secondary bile acids, tryptophan metabolites, short-chain and medium-chain fatty acids, sphignolipids, and kynurenine). These metabolites and other products of bacterial metabolism can globally regulate the expression of different immune genes in the colon, e.g., in the GI lamina propria, reducing inflammation and its associated histopathology.

### Example 8: Assessment of SCFA Production by HDAC Inhibition Assay

[0372] Short-chain fatty acids (SCFAs) have been described as playing a role in regulating host immunity. Studies have described altered patterns of SCFA in patients of different gastrointestinal diseases, e.g., colitis, and administration of butyrate and propionate have been reported to have therapeutic effects in a colitis animal model. Both in vitro and in vivo, SCFAs have been shown to inhibit histone deacetylate (HDAC) activity, which can then, in turn, regulate many aspects of an immune response (e.g., induction of FoxP3⁺ regulatory T cells). Therefore, bacteria that can produce SCFAs can be useful for the treatment of IBD (e.g., UC) patients.

[0373] Given that the type and level of SCFA production in fermentations with fecal slurries depends on the carbon source used (Yang et al., Anaerobe 23:74-81 (2013)), HDAC inhibition was evaluated in supernatants of bacterial strains grown in a variety of carbon (C) sources including mono-, di-, polysaccharides, and porcine mucine. For these experiments, 600 μL cultures in peptone/yeast extract medium (PY) alone or supplemented with 0.5% of one of seven C sources (glucose, fucose, sucrose, starch, pectin, FOS/inulin, or mucin) were inoculated in 96 deep-well plates and grown anaerobically for 4 days. Microbial cells were pelleted by centrifugation, and supernatants were used for the HDAC inhibition assay (HDAC-Glo I/II assay kit, Promega) and HeLa nuclear extract (Promega) as the source of HDAC enzymes. Assays were performed with 15 μL supernatant, 10 μL 1M Tris pH 8, 75 μL of assay buffer containing diluted HeLa nuclear extract which were preincubated for 15 minutes prior to the addition of developing reagent. Luminescence was measured after 20 minutes. Under these conditions, a sterile supernatant spiked with 15 mM butyrate resulted in 65-75% HDAC inhibition.

[0374] As shown in FIG. 13, a number of bacterial strains were associated with the ability to inhibit HDAC activity. The bacteria were grouped into one of seven phenotypic clusters (represented as 0-6 in FIG. 13) based on their ability to inhibit HDAC activity when grown in different nutrient sources (termed herein “HDAC clusters”). For example, Cluster 0 corresponds to strains that were able to inhibit HDAC when grown on fucose (a sugar found as a component of mucin glycoproteins) but not on other substrates. These strains utilized fucose as a substrate for propionate production, but not amino acids present in the basal media or other simple and complex carbohydrates added in other conditions. Phenotypic Cluster 5 corresponds to strains that inhibited HDAC when grown only in the presence of simple sugars or starch. Phenotypic Cluster 4 corresponds to strains that inhibited HDAC in all conditions but their activity did not increase by the addition of sugars or polysaccharides. Thus, while many bacterial strains had the capacity for HDAC inhibition, they were able to express that capacity only in the presence of certain substrates (e.g., fucose, mucin, or starch).

[0375] The above data indicate that to maximize the SCFA production in vivo, it can be useful to include in a bacterial composition for the treatment of an inflammatory disease (e.g., ulcerative colitis) at least one representative bacteria from each of the phenotypic clusters. The DE1 composition described above in Example 7 is an example of such a composition (i.e., includes at least one representative per HDAC cluster.) In some embodiments, the bacteria of a microbiome composition are, collectively, capable of utilizing at least 2, 3, 4, 5, 6, or 7 of these C sources.

### Example 9: Anti-Inflammatory Activity with Intestinal Epithelial Cells

[0376] IL-8 level is generally elevated in the inflamed intestinal mucosa of UC patients. Accordingly, the ability to suppress IL-8 induction in intestinal epithelial cells is a relevant readout for identifying bacterial species that can modulate the anti-inflammatory innate immune response in UC patients. Briefly, HT29 cells (an epithelial cell line derived from a colorectal carcinoma), cultured in McCoys Medium supplemented with 10% FBS, GlutaMAX and Pen/Strep were plated at a density of 50k cells/well in 96-well format and allowed to grow for 5 days until fully confluent. Culture medium was changed every two days. On day 5, cells were pre-treated for 1 hour with a bacterial metabolite (butyrate, propionate, or acetate; FIG. 14A) or with bacterial supernatants (10% in cell culture medium; FIG. 14B) before exposure to 1.25 ng/ml recombinant human TNF-α (Peprotech). Cells were incubated for 4 hours. Culture supernatants were collected and assayed for human IL-8 protein by ELISA (R&D systems) or AlphaLISA (Perkin Elmer). IL-8 levels of test samples were normalized to inflammatory controls that were 10% blank bacterial culture medium pre-treated samples that were exposed to the 1.25 ng/ml TNF-α. To measure the pro-inflammatory capacity of individual bacterial strains, human IL-8 concentrations were measured in cell culture supernatants treated with 10% bacterial supernatant in the absence of TNF-α stimulation.

[0377] As shown in FIG. 14A, treating the IECs with any of the short-chain fatty acids tested (i.e., butyrate, propionate, or acetate) resulted in reduced levels of TNF-α-dependent IL-8 secretion. Importantly, supernatants of an HHSP grown in vitro were also able to inhibit IL-8 secretion by IECs in a dose-dependent manner (see FIG. 14B), demonstrating the ability of a microbiome composition to reduce inflammation, e.g., in an IBD such as ulcerative colitis.

[0378] Because bacteria can also induce IL-8 directly through toll-like receptor (TLR) activation, a pro-inflammatory assay was designed to identify bacterial strains having this ability (i.e., bacteria capable of TNF-α-independent IL-8 activation). Such strains could be pro-inflammatory in vivo, therefore exacerbating inflammation in UC patients. Accordingly, it can be undesirable to include in a microbiome composition a bacterial strain that can exhibit this activity.

[0379] As shown in FIGS. 15A and 15B, many of the supernatants (each circle represents an individual supernatant) exhibited the ability to modulate (e.g., decrease) TNF-α-dependent IL-8 secretion (y-axis), and the anti-inflammatory activity generally correlated with inhibition of HDAC activity of the supernatants (x-axis). However, some of the supernatants had no anti-inflammatory activity in IECs despite having HDAC inhibitory activity, or even resulted in additional IL-8 production over that induced by TNF-α (i.e., these were points, where IL-8 anti-inflammatory activity, on the y-axis, did not correlate with HDAC inhibition, on the x-axis). The majority of these outliers were supernatants with activity in the pro-inflammatory assay (light gray); that is, these strains resulted in IL-8 secretion, which can lessen or even outweigh the anti-inflammatory effects of their inhibition of HDAC activity. In addition, strain-level variability was observed in the pro-inflammatory properties of closely related strains, indicating that bile acid activities and pro-inflammatory properties are not always conserved among different strains of the same species (at least among the Lachnospiraceae species) (FIG. 17). Similar results were observed for Wnt activity (FIG. 16).

[0380] These results underscore the fact that anti-inflammatory activity is not an inherent property of bacterial strains that produce SCFAs and inhibit HDAC, but rather that strains need to be tested, e.g., directly in cell-based assays to identify those with pro-inflammatory activity of their own. These data demonstrate that when constructing a microbiome composition, although closely related bacteria (e.g., species or OTUs) may typically share functional features leading to, for example, pro-inflammatory or anti-inflammatory activities, it can be advantageous to assay the specific strain to be used in a composition as well as the entire composition to define the appropriate set of functions for immune modulation.

### Example 10: Determination of SCFA and Tryptophan Metabolite Profiles in Single Strain Supernatants

[0381] As described supra, certain tryptophan (Trp) metabolites were associated with remission in patients treated with an HHSP. Accordingly, Applicant tested various bacterial species for the presence of SCFA or tryptophan metabolites in their supernatants. The presence of the tryptophan metabolites was determined using a colorimetric assay for detection of indolic compounds (Indole Reagent, Anaerob Systems). Indole produces a light blue color in this assay, while other Trp metabolites produce purple color. The presence of SCFAs were tested using the HDAC assay (described supra). Supernatants of selected strains that were identified as producers of Trp metabolites by the colorimetric indole assay, and/or producers of SCFAs by the HDAC assay were further analyzed by GC-MS to identify the specific metabolites produced.

[0382] The results of the SCFA analysis are shown in FIG. 18 and the results of the Trp metabolites are shown in FIG. 19. Many bacterial supernatants contained one or more of the SCFAs generally associated in the literature with anti-inflammatory activity (butyrate and propionate) (see FIG. 18).

[0383] In addition, several bacterial species produced branched chain fatty acids, 2-methyl-propanoate, 3-methyl-butanoate, and 3-methyl-pentanoate, which are produced by bacterial fermentation of branched amino acids and have been shown to have HDAC inhibitory activity.

[0384] Several species were identified as producers of medium chain fatty acids (MCFAs), e.g., valerate and hexanoate, both of which were surprisingly correlated with efficacy in the metabolomic clinical data and are therefore species producing these are candidates for use in UC treatment. Valerate producing species included Anaerotruncus colihominis, Clostridium sporogenes, Flavonifractor plautii, Peptostreptococcus anaerobius, and Peptostreptococcus stomatis. Hexanoate producing strains include Anaerotruncus colihominis, Clostridium sporogenes, Flavonfractor plautii, Clostridium glycolicum, Clostridium innocuum, and Roseburia intestinalis.

[0385] Collectively, the above data indicate that the functional attributes of bacteria can be utilized to identify bacterial species that can be used to treat a disease and target multiple host pathways, such as ulcerative colitis. Summary of the phenotypic profile of different bacterial strains disclosed herein are provided in Table 4, below.

### Example 11: Catalase Activity

[0386] The inflammatory conditions associated with a disease or disorder disclosed herein (e.g., IBD) result in a high abundance of reactive oxygen species (ROS) that are toxic for many commensal organisms. For example, intestinal epithelial cells of UC and Crohn's disease patients can express high levels of DouxA which releases hydrogen peroxide into the lumen. Additional ROS can be released by activated macrophages. Some bacteria have ROS detoxifying enzymes such as catalase and superoxide dismutase that allow them to survive under inflammatory conditions and thus, could be particularly well adapted to engraft in UC patients.

[0387] Cultures of a large number of bacterial symbionts were screened for catalase activity by addition of 5 ul of 30% solution of hydrogen peroxide. Catalase activity was detected by the appearance of oxygen bubbles in the cultures. Only 19 strains out of ˜400 strains tested were positive for catalase activity indicating that this is a rare function among the screened species. Non-limiting examples of catalase positive species included Bacteroides sp. 1 1 6, Bacteroides sp. 1 1 30, Bacteroides ovatus, Bacteroides intestinalis, Bacteroides faecis, Bacteroides salyersiae, Bacteroides eggerthii, Eggerthella lenta, Lachnospiraceae bacterium 5 1 57FAA, Clostridium lavalense, Ruminococcus gnavus, and Clostridium hathewayi. Inclusion of one or more of these species in a bacterial composition (e.g., those disclosed herein) could be beneficial for the survival of the administered bacterial composition in a patient suffering from a disease or disorder disclosed herein (e.g., UC and Crohn's disease).

### Example 12: Wnt Pathway Activation by Bacterial Supernatants

[0388] The cells of the intestinal epithelium are constantly replenished in order to maintain tissue homeostasis. Tissue renewal is driven by an active intestinal stem cell compartment that is dependent on Wnt pathway activation. Intestinal stem cells are exquisitely sensitive to Wnt due to the specific expression of Lgr5. Lgr5 forms a R-spondin co-receptor complex with ZNRF3, a membrane E3 ubiquitin ligase and Wnt pathway negative-feedback regulator that targets the Wnt receptor for removal from the cell surface. In the presence of R-spondin, Lgr5+intestinal stem cells maintain elevated levels of the Wnt receptor, Frizzled, on the cell surface enabling sustained pathway activation (Clevers et al. Science. 2014). R-Spondin has been shown to protect the intestinal epithelium after injury by promoting intestinal stem cell driven tissue recovery (Takashima et al., The Journal of Experimental Medicine. 2011).

[0389] To assess whether amplification of Wnt pathway activation in intestinal stem cells by commensal bacteria could contribute to fortifying the epithelial barrier and tissue homeostasis, a Wnt pathway reporter cell line (HEK 293 STF (ATCC CRL-3249)) was utilized. The cell line was used evaluate the ability of bacterial culture supernatants and metabolites to activate the reporter in a similar manner to R-spondin. Addition of Wnt pathway stimulator compounds, such as Wnt3α protein or R-Spondin, to cultured HEK 293 STF cells leads to the production of luciferase that can be measured by luminescence detection. To measure the ability of bacterial supernatants to enhance Wnt pathway activation, HEK 293 STF cells cultured in DMEM medium supplemented with 10% FBS, GlutaMAX and Pen/Strep were plated at a density of 50k cells per well in 96 well format and allowed to grow for 3 days until fully confluent. Culture medium was changed every other day. On day 3, cells were treated with 10% bacterial supernatant in Wnt3α conditioned medium (produced from L-Wnt3α cells ATCC CRL-2647) and incubated overnight. Wnt3α conditioned medium supplement with 250 ng/ml recombinant human R-spondin (R&D systems Cat#4645) was used as a positive control for enhanced Wnt pathway activation. After treatment incubation, Bright-Glo luciferase detection reagent (Promega) was added to all wells and incubated for 20 minutes at room temperature. Luminescence was measured using a Perkin Elmer Envision multi-mode plate reader. Supernatants from DEs grown in vitro differentially activate the HEK 293 STF reporter when added to Wnt3α conditioned medium. As seen in FIG. 16, bacterial supernatants were able to enhance Wnt pathway expression and there was a positive correlation between HDAC inhibition and Wnt activation. These results demonstrate that the inclusion of bacterial species capable of enhancing Wnt pathway activation in designing a bacterial composition could be beneficial in treating diseases characterized by epithelial damage, such as those disclosed herein (e.g., UC and graft-versus-host disease).

### Example 13: Designing Bacterial Compositions and Screening for Functional Properties

[0390] In designing the bacterial compositions of the present disclosure, the compositions were constructed to have one or more of the following features: (1) capable of engrafting (long-term and/or transient) one or more species when administered to a subject; (2) capable of having anti-inflammatory activity (e.g., inhibiting TNF-α-driven IL-8 secretion in epithelial cells in vitro, and/or ability to downmodulate expression of inflammatory genes (e.g., CXCL1, CXCL2, CXCL3, CXCL11, ICAM1)); (3) not capable of inducing pro-inflammatory activity (e.g., does not induce IL-8 production by IECs); (4) capable of producing secondary bile acids (e.g., 7α-dehydroxylase and bile salt hydrolase activity); (5) not capable of producing ursodeoxycholic acid (e.g., 7β-hydroxysteroid dehydrogenase activity) (6) capable of producing tryptophan metabolites (e.g., indole, 3-methyl indole, indolepropionic acid); (7) capable of producing medium-chain (e.g., valerate and hexanoate) and/or short-chain fatty acids (e.g., butyrate and propionate); (8) capable of inhibiting HDAC activity when grown with at least one carbon source; (9) including species belonging to one or more HDAC clusters; (10) capable of restoring epithelial integrity, as determined by a primary epithelial cell monolayer barrier integrity assay; (11) having bacterial species that are capable of being associated with clinical remission of an inflammatory bowel disease; (12) lacking bacterial species that are capable of being associated with non-remission of an inflammatory bowel disease; (13) capable of expressing catalase activity; (14) capable of having alpha-fucosidase activity; (15) capable of inducing Wnt activation; and (16) not capable of activating a toll-like receptor pathway, e.g., toll-like receptor 5 (TLR5) and/or toll-like receptor 4 (TLR4). This was accomplished by including one or more bacterial species with the above features in the different designed compositions.

[0391] In total, thirty-eight (38) different designed compositions were constructed (DE1-DE38) and screened for functional properties exhibited when grown as a bacterial community in vitro as follows. The designed bacterial compositions were mixed in equal ratios at ˜1-5×10⁷ colony forming units (CFU)/ml of vegetative bacteria and ˜1×10⁴-1×10⁵ CFU/ml of spore forming bacteria (when relevant) and frozen in 15% glycerol. For cultivation, the bacterial compositions were thawed, the glycerol was removed and the mix germinated in 0.5% BHI/Oxgall for 1 hour at room temperature when they contained spore preparations. Compositions containing vegetative bacteria did not undergo germination. The germinant was then washed and the cultures diluted to a final concentration of 5×10⁷ fu/ml and plated as biological replicates in a synthetically derived, fecal culture medium 4 (FCM4), that supports growth of many anaerobic gut bacteria. In experiments where secondary bile acid production by bacterial communities was assayed, FCM4 was supplemented with conjugated bile acids (glycocholic acid, taurocholic acid, glycochenodeoxycholic acid and taurochenodeoxycholic acid) at a final concentration of 50 uM. Bacterial cultures were incubated anaerobically at 37° C. for 7 days, after which their biomass was measured by absorbance of 100 μL culture at 600 nm. The remaining culture was centrifuged at 4000 rpm, the supernatants passed through a 0.2 uM filter and used in biochemical and cell-based assays. HDAC inhibition assays, pro-inflammatory assay in IECs, anti-inflammatory assay in IECs, epithelial integrity assay, and Wnt activation assay, determination of SCFAs, MCFAs, and tryptophan metabolitesTr were performed as described in the previous examples. For determination of bile acid metabolites, 100 μL of bacterial cell-free supernatant was then extracted with an equal volume of acetonitrile and filtered through a 0.2 μm filter, generating samples for LC-MS analysis. Bile acids were separated using an Agilent 1260 HPLC equipped with a Microsolv bidentate C18 column preceded by a 0.2 μm pre-column filter. Separation was achieved using a water and acetonitrile gradient with 0.1% formic acid at a flow rate of 0.4 ml/minute. Samples were injected at a volume of 5 μL. The HPLC system was coupled to a Bruker Compass™ qTOF mass spectrometer calibrated to a mass range of 50 to 1700 m/z using the Agilent low-mass tuning mix. Each run was additionally calibrated to a reference mass solution injected at the beginning of each run. Bile acids were detected in negative mode and identified by unique m/z and retention times compared to known pure standards. Area under the peak was determined using Bruker data analysis software. Metabolites were quantified using calibration curves generated from pure standards, ranging in concentration from 0.001 μM to 100 μM.

[0392] Supernatants from the DEs were also assayed for their ability to activate TLR4 and TLR5 pathways. Toll-like receptors (TLRs) are pattern recognition receptors (PRR) that bind to pathogen-associated molecular patterns (PAMP) such as bacterial cell wall components, i.e. peptidoglycans, lipopolysaccharides, surface proteins, etc. TLR4 and TLR5 receptors are known to bind to antigens and induce a pro-inflammatory response. TLR4 binds to lipopolysaccharide (LPS) which is present in gram-negative bacteria while TLR5 binds to flagellin (FLA), found in motile bacteria. We predict that designed bacterial compositions that exclude gram-negative and IL-8 inducing bacterial strains should not activate TLR4 or TLR5. We utilized a TLR receptor reporter cell lines, HEK-Blue hTLR4 (Invivogen, cat #hkb-htlr4), hTLR5 (Invivogen, cat #hkb-htlr5) to evaluate the ability of bacterial culture supernatants and metabolites to activate the TLR4 and TLR5 reporters. HEK-Blue Null1 (Invivogen, cat #hkb-null1) cells were included as a control reporter cell line for TLR receptor endogenously expressed in the parental cell line HEK 293 that allowed measurement of background HEK-Blue signal. HEK-Blue TLR reporter cell lines are co-transfected with a plasmid designed to overexpress a given TLR receptor and a Secreted Alkaline Phosphatase (SEAP) gene under the control of NF-kB and AP-1 promoters (Invivogen). Activation of the given TLR reporter in leads to secretion of SEAP in solution which is measured by absorbance (655 nm). To measure TLR4 and TLR5 activation by the bacterial supernatants, HEK-Blue hTLR4, hTLR5 and HEK-Blue Null1 cells cultured in DMEM medium supplemented with 10% FBS, GlutaMAX and Pen/Strep were plated at a density of 50,000 cells/well in 96 well format and allowed to reach 100% confluency after 5-7 days in culture. Culture medium was replaced every other day. Once the wells were 100% confluent, the cells were treated with 10% bacterial supernatant in cell culture medium and incubated overnight. For HEK-Blue hTLR4 reporter assay positive control we used cell culture medium supplemented with 100 ng/ml LPS-EK (Invivogen cat #tlrl-peklps) and 10% FCM4+media. For HEK-Blue hTLR5 reporter assay positive control we used cell culture medium supplemented with 60 ng/ml of FLA-BS (invivogen cat #tlrl-pbsfla) and 10% FCM4+media. Each TLR reporter cell line had a Null plate with same treatment and respective positive control. After treatment incubation overnight, HEK-Blue Detection Media (Invivogen, cat #hb-det3) was added to all wells and incubated for 2 hours at 37° C., 5% C02. SEAP secretion was measured as absorbance (655 nm) using a Spectramax plate reader.

[0393] Bacterial composition supernatants were also evaluated for their capacity to modulate gene expression in primary human colonic organoids as follows. Primary human colon organoid cultures established from isolated colon crypts were grown and expanded in Matrigel® (Corning) and 50% L-cell conditioned medium containing Wnt3a, R-spondin 3 and Noggin (L-WRN) as described by VanDussen et al. (Gut 64:911-920, 2015). Colon organoids were grown in 24-well plates for 5 days in 50% L-WRN medium. After 5 days of mini-gut structure formation in 50% L-WRN medium, organoid culture medium was switched to 5% L-WRN medium to induce differentiation of the organoids. After 24 hours in 5% L-WRN medium, organoids were treated with 10% DE supernatants in fresh 5% L-WRN medium supplemented with the inflammatory cytokine 12.5 ng/ml human TNFa (Peperotech). Control conditions include organoids treated with 5% L-WRN+10% bacterial culture medium and 5% L-WRN+10% bacterial culture medium+12.ng/ml human TNFa. Organoids were incubated in treatment conditions overnight and then collected in Qiagen RLT buffer for RNA analysis. Sample lysates were either purified into RNA using Qiagen RNeasy mini prep kit or lysates were assayed directly on the Nanostring nCounter platform.

[0394] Table 6 summarizes the number of strains possessing several of these properties in the exemplary designed compositions disclosed herein. Table 6 describes the number of strains present in consortia: a) with HDAC inhibition phenotypes (rows HDAC cluster 0, HDAC cluster 1, HDAC cluster 2, HDAC cluster 3, HDAC cluster 4, HDAC cluster 5, HDAC cluster 6), b) that produce short-chain and medium-chain fatty acids (rows Propanoic acid, Butanoic acid, Pentanoic acid, Hexanoic acid), c) that produce tryptophan metabolites (rows Indole, 3-methyl indole, 3-indolacrylic acid), d) that have bile acid metabolic activity (rows BSH gCA [for bile salt hydrolase activity on glycocholic acid], BSH tCA [for bile salt hydrolase activity on taurocholic acid], BSH gCDCA [for bile salt hydrolase activity on glycochenodeoxycholic acid], BSH tCDCA [for bile salt hydrolase activity on taurochenodeoxycholic acid], 7aD CA [for 7α-dehydroxylase activity on cholic acid], 7aD CDCA [for 7α-dehydroxylase activity on chenodeoxycholic acid], 7bHSDH UDCA [for 7β-hydroxysteroid dehydrogenase activity on CDCA]), e) that express catalase activity (row Catalase), f) that have fucosidase activity (row a-L-Fucosidase), g) that induce IL-8 (row IL8 Inflammatory), h) that are long-term engrafters (row LTE) or transient engrafters (row TE); i) that are associated with clinical remission (row Remission Associated) or non-remission (row Non-remission Associated).

[0395] FIGS. 30, 31, and 32 identify the bacterial species included in the different designed compositions. Depending on their bacterial species make-up, the designed bacterial compositions exhibited varying functional activity—see, e.g., FIGS. 20B, 21B, and 24B (inhibition of HDAC activity); FIGS. 20C, 21C, and 22C (anti-inflammatory activity); FIGS. 20D, 21E, and 22D (pro-inflammatory activity); FIGS. 20E, 21D, and 22E (restoration of epithelial integrity); FIGS. 20I-20L, 21H-21K, and 22F-22H (short-chain and medium-chain fatty acid production); FIGS. 20M, 21L, 21M, 221, and 22J (tryptophan metabolite production); FIGS. 21N-21P and 22K-M (secondary bile acid production); FIGS. 20N-20Q, 22N, and 22P (regulation of genes associated with inflammatory response); FIGS. 20R-20T (regulation of genes associated with Wnt activation); and FIGS. 20G, 20H, 21F, 21G, 22Q, and 22R (activation of a toll-like receptor pathway). And, as shown in FIGS. 25A and 25B, many of the designed compositions disclosed herein were similar or better at producing indole and butanoic acid (metabolites associated with anti-inflammatory responses) compared to FMT and even certain healthy human spore product (DXE).

[0396] From the thirty-eight (38) different designed compositions were constructed (DE1-DE38), 36 were designed to have beneficial properties for UC, while two (DE9 and DE38) were designed to include deleterious properties, such as the inclusion of strains with strong pro-inflammatory activity in the IEC assay to test the importance of excluding such strains from therapeutic compositions. The results presented here clearly showed that the two negative control compositions (DE9 and DE38), despite having HDAC inhibitory activity, failed to supresssuppress TNFalpha-driven IL8 production, stimulated IL8 on their own, and failed to suppress the disruption of epithelial primary monolayers caused by interferon gamma. In addition, the negative control compositions were positive in the TLR4 and TLR5 activation assay (FIGS. 20G and 20H), failed to suppress TNFa-driven expression of pro-inflammatory genes in colonic organoids (FIG. 20C). In contrast, all the other 36 compositions tested did not exhibit any of these deleterious functions, demonstrating the importance of excluding IL8-inducing strains from compositions as described in this example.

[0397] Moreover, while all the bacterial compositions were designed to include species with HDAC inhibitory activity, compositions with lower number of such strains, or less coverage of the different HDAC clusters described herein, (e.g., DE984662.1 (DE3) and DE698478.1 (DE10)) resulted in decreased overall HDAC inhibitory activity, even after cultures had reached saturation. This result highlights the importance of including high representation of HDAC inhibitory strains and clusters to allow for maximum utilization of nutrients for production of SCFAs and HDAC inhibition.

[0398] The 36 therapeutic compositions were designed for anti-inflammatory activity based on the single strain activity in the IEC assay but the effect of supernatants was also evaluated in a primary colonic organoid described above to explore the width of the anti-inflammatory activity and evaluate the modulation of additional disease-relevant pathways. Transcriptional analysis of colon organoids treated with TNFa revealed that pro-inflammatory cytokines relevant to ulcerative colitis (more highly expressed in UC in HMP2). such as CXCL1, CXCL2, CXCL3, and CXCL11 were also induced in vitro. Moreover, these levels of these transcripts in TNFa treated colon organoids were reduced in the presence of DEs with the highest levels of HDAC inhibition (FIGS. 20H, 20I, 20J, and 20K) underscoring the importance of designing compositions for maximum HDAC inhibition capacity as described here. Interestingly, DE8, which was designed to be an ineffective DE, did not lead to any decrease in abundance of TNFa induced transcripts, validating the exclusion of IL8-inducing strains from designed compositions. In addition, Wnt pathway target genes, CD44 and LRP6, were shown to have increased expression in response to DEs that most strongly activated the HEK 293 STF Wnt pathway reporter cell assay (FIG. 20L, FIG. 20 M and FIG. 20N). These data suggest that Wnt activating consortia can contribute to supporting Wnt pathway driven intestinal epithelium homeostasis to facilitate repair of mucosal injuries associated with diseases or disorders disclosed herein (e.g., IBD).

[0399] Additionally, expression of genes under the control of the Ahr pathway which is involved in barrier protection and immunomodulation were also evaluated in the human organoid system. As seen in, e.g., FIG. 20O, designed compositions were able to induce expression of Cyp1A1 gene which encodes an enzyme of the cytochrome P450 superfamily in the AhR pathway. Importantly, the ability to induce Cyp1A1 was directly correlated to the abundance of indole, and described AhR agonist, in the supernatants and, in contrast with Wnt and antinflammatory activities, is not proportional to SCFAs and HDAC inhibition indicating that the design compositions successfully affect host responses by more than one mechanism of action.

[0400] Finally, as can be seen in FIGS. 25A to 25C, 26A, and 26B, design compositions described herein had similar (if not better) properties as an FMT and spore fraction (HHSP) of a healthy donor: HDAC inhibition, anti-inflammatory activity and SCFA production. Importantly, the analysis of gene expression in colonic organoids showed that there was very significant overlap between the gene expression signature of a TNFalpha treated organoid and the gene expression in biopsies of UC subjects, and that both the HHSP and composition supernatants can reverse a significant part of that signature including several inflammation related genes, such as Cxcl1, Cxcl2 and ICAM1. These results indicate that compositions designed by the criteria describe here recapitulate many features of complex natural products and have the potential to modulate host gene expression to restore intestinal health.

[0401] These results demonstrate that bacterial compositions can be designed to have specific functional features. Such ability suggests that depending on the pathways involved, different compositions can be designed to treat a wide range of diseases and/or disorders. The results also show that compared to much more complex products (e.g., FMT and spore-prep compositions), the designed compositions disclosed herein are superior at producing certain metabolites that can be important in treating certain inflammatory diseases.

[0402] Collectively, the results disclosed herein show that combining data on functional features of strains and bacterial consortia with data on which species will engraft in human subjects (Table 5) ensures that the consortia will express these functional features when administered to human subjects. Importantly, the results further demonstrate that while many strains could be selected that may possess one or more of the desired functional features disclosed herein, such species will not necessarily engraft when administered to human subjects. Therefore, such species would not likely be of therapeutic value since they would not be able to express these functional features and have the desired effect when administered to patients. The bacterial compositions disclosed herein comprise one or more bacteria that not only allow the composition to exert the different functional features disclosed herein, but are also capable of engrafting when administered to human subjects.

[0403] Furthermore, combining data on functional features of strains with their association with clinical remission in human subjects (Table 3) ensures that the consortia will express functional features with therapeutic benefit while not promoting non-remission through other mechanisms.

[0404] Data across these consortia furthermore show that, for example: 1) consortia containing multiple (e.g., 5, 7, 10, 15, 18) HDAC inhibiting strains, sometimes coming from distinct HDAC clusters, have stronger HDAC inhibition than those with few HDAC inhibiting strains (e.g., 2, 3, 4, 5), 2) unlike HDAC, consortia affect certain other functional targets equally despite if there is only one or a few strains possessing that function, 3) exclusion of pro-inflammatory strains results in better repair of the intestinal epithelial barrier, 4) these designed compositions have the same effect as donor-derived HHSP or fecal microbial transplant on the host expression of a wide range of genes associated with ulcerative colitis, 5) compositions designed to affect the levels of several distinct molecules (e.g. short-chain fatty acids and tryptophan metabolites) can modulate diverse disease-relevant pathways and have multiple mechanisms of action (reduction of pro-inflammatory cytokine expression and increase in Wnt pathway expression, or increase expression of AhR pathway, respectively).

### Example 14: Analysis of the Effect of Designed Compositions on Anti-Tumor Responses to Immune Checkpoint Inhibitors

[0405] To assess whether the designed compositions disclosed herein could also be useful in treating cancers, a MC38 tumor model was used. Briefly, approximately three weeks prior to tumor inoculation, the DE286037.1 (DE1) composition was administered to the animals. DE1 was administered once, on week-3, at a dose of 10⁷ per strain; 3 weeks of colonization were allowed before tumor cell inoculation on day 0. Then, the MC38 tumor cells were transplanted into the animals (via subcutaneous administration). Anti-PD-1 antibody was administered to the animals at days 7, 10, 13, and 16 post tumor inoculation. Control animals received a control isotype antibody instead. Tumor volume was measured at days 8, 10, 13, 15, and 17 post tumor inoculation. At day 17, the animals were sacrificed and the percentages of tumor infiltrating CD8 T cells and regulatory T cells were determined in the tumors of the animals.

[0406] Surprisingly, as shown in FIG. 27B, animals that received both the DE1 composition and the anti-PD-1 antibody had greater reduction in tumor volume, compared to the control animals. The increased reduction in tumor volume was apparent as early as days 8-10 post tumor inoculation. The improved effect on tumor volume was associated with increased percentage of CD8 T cells in the tumors, resulting in increased CD8 T cell:Treg ratio (FIG. 27C). Similar results were observed with the DE2 composition in combination with anti-PD-1 antibody (FIGS. 28A, 28B, and 28C).

[0407] Next, to confirm the anti-tumor effects of the DE1 composition described above, a BP tumor model was used. The tumor was a melanoma derived from a Braf/pTEN knockout mouse. Briefly, the DE1 composition was administered to the animals, and then, approximately three weeks later, the animals were subcutaneously inoculated with the BP tumor cells. Anti-PD-L1 antibody or a control isotype antibody was administered to the animals at days 5, 8, 11, and 14 post tumor inoculation. Tumor volume was measured at days 8, 10, 12, and 15 post tumor inoculation. At day 15, animals were sacrificed, and the tumors analyzed.

[0408] In agreement with the earlier data, animals that received the anti-PD-L1 antibody in combination with the DE286037.1 (DE1) composition had increased reduction in tumor volume, compared to the control group (FIG. 29B). Again, the animals treated with the combination of anti-PD-L1 antibody and DE1 had greater percentage of CD8 T cells in their tumors, resulting in increased CD8 T cell:Treg ratio (FIGS. 29C and 29D). The tumors also had greater percentage of CD4 T cells, compared to the control animals (FIG. 29E).

[0409] Collectively, the above data demonstrate that when administered in combination with an immune checkpoint inhibitor, the DE286037.1 (DE1) composition can be useful in treating certain cancers. As described supra, cancers are generally not thought to be associated with pro-inflammatory responses, and cancer immunotherapy generally aims to increase host pro-inflammatory responses targeting cancer cells. Therefore, it was not reasonably expected that a bacterial composition designed to have anti-inflammatory properties (i.e., DE1 and DE2) would be effective for enhancing anti-tumor response. result further highlights that a bacterial composition can be designed to target multiple immune pathways, and thereby, treat wide range of diseases, including both inflammatory diseases and cancers.

TABLE 4
Phenotypic Summary

| | | | | Anti- | Pro- |
|---|---|---|---|---|---|
| | | | | inflam- | Inflam- |
| | | | | matory | matory |
| | | | | in any | in any |
| | | | | C source | C-source |
| | HDAC | | | (>50% | (>25% |
| | Inhibition | | Trp | reduction | increase |
| | in any C | | metabolite | on IL8 | in IL8 |
| | source | HDAC | positive in | compared | relative to |
| | (25/18% | cluster | in any C | to TNFa | medium |
| Species | cutoff) | assignment | source | control) | control) |
| Akkermansia muciniphila | 0 | 1 | 0 | 0 | 0 |
| Alistipes finegoldii | 0 | 1 | 1 | 0 | 0 |
| Alistipes onderdonkii | 1 | 1 | 1 | 1 | 0 |
| Alistipes shahii | 1 | 1 | 0 | 0 | 0 |
| Anaerotruncus colihominis | 0 | 1 | 0 | 0 | 0 |
| Anaerotruncus colihominis | 1 | 4 | 1 | 0 | 0 |
| Bacteroides caccae str. 1 | 0 | 1 | 0 | 0 | 0 |
| Bacteroides caccae str. 2 | 1 | 1 | 0 | 0 | 0 |
| Bacteroides caccae str. 3 | 0 | 1 | 0 | 0 | 0 |
| Bacteroides dorei | 0 | 1 | 0 | 0 | 0 |
| Bacteroides eggerthii str. 1 | 0 | 1 | 1 | 0 | 0 |
| Bacteroides eggerthii str. 2 | 0 | 1 | 1 | 0 | 0 |
| Bacteroides eggerthii str. 3 | 1 | 3 | 1 | 0 | 0 |
| Bacteroides faecis | 1 | 3 | 1 | 0 | 0 |
| Bacteroides intestinalis | 1 | 3 | 1 | 0 | 0 |
| Bacteroides nordii | 0 | 1 | 0 | 0 | 0 |
| Bacteroides ovatus str. 1 | 1 | 3 | 1 | 0 | 0 |
| Bacteroides ovatus str. 2 | 0 | 1 | 0 | 1 | 0 |
| Bacteroides salyersiae str. 1 | 0 | 1 | 1 | 0 | 0 |
| Bacteroides salyersiae str. 2 | 1 | 3 | 1 | 0 | 0 |
| Bacteroides sp 1 1 30 | 1 | 0 | 0 | 0 | 0 |
| Bacteroides sp 1 1 6 | 1 | 1 | 1 | 0 | 0 |
| Bacteroides sp 2 1 22 | 0 | 1 | 1 | 0 | 0 |
| Bacteroides sp 3 1 23 str. 1 | 0 | 1 | 1 | 0 | 0 |
| Bacteroides sp 3 1 23 str. 2 | 0 | 1 | 1 | 0 | 0 |
| Bacteroides sp 4 1 36 | 1 | 2 | 1 | 0 | 0 |
| Bacteroides sp D20 str. 1 | 1 | 3 | 1 | 0 | 0 |
| Bacteroides sp D20 str. 2 | 1 | 0 | 1 | 1 | 0 |
| Bacteroides sp D22 | 1 | 3 | 1 | 0 | 0 |
| Bacteroides stercoris | 1 | 4 | 1 | 0 | 0 |
| Bacteroides uniformis str. 1 | 1 | 3 | 1 | 1 | 0 |
| Bacteroides uniformis str. 2 | 1 | 2 | 1 | 1 | 0 |
| Bacteroides vulgatus str. 1 | 1 | 2 | 0 | 0 | 0 |
| Bacteroides vulgatus str. 2 | 1 | 2 | 0 | 0 | 0 |
| Bifidobacterium adolescentis | 0 | 1 | 0 | 0 | 0 |
| Bifidobacterium catenulatum | 0 | 1 | 0 | n.d. | n.d. |
| Bifidobacterium longum str. 1 | 0 | 1 | 0 | 1 | 0 |
| Bifidobacterium longum str. 2 | 0 | 1 | 0 | 0 | 0 |
| Bifidobacterium longum str. 4 | 0 | 1 | 0 | n.d. | n.d. |
| Bifidobacterium longum str. 5 | 0 | 1 | 0 | 0 | 0 |
| Bifidobacterium | 0 | 1 | 0 | 0 | 0 |
| pseudocatenulatum str. 1 | | | | | |
| Bifidobacterium | 0 | 1 | 0 | n.d. | n.d. |
| pseudocatenulatum str. 2 | | | | | |
| Blautia coccoides str. 1 | 0 | 1 | 0 | 0 | 0 |
| Blautia coccoides str. 2 | 1 | 3 | 0 | 1 | 0 |
| Blautia glucerasei | 0 | 1 | 0 | 0 | 0 |
| Blautia producta str. 1 | 1 | 1 | 0 | 1 | 0 |
| Blautia producta str. 2 | 0 | 1 | 0 | 0 | 1 |
| Blautia producta str. 3 | 0 | 1 | 0 | n.d. | n.d. |
| Blautia producta str. 4 | 0 | 1 | 0 | 0 | 1 |
| Blautia producta str. 5 | 0 | 1 | 0 | 1 | 0 |
| Blautia producta str. 6 | 0 | 1 | 0 | 0 | 0 |
| Blautia schinkii str. 1 | 0 | 1 | 0 | 0 | 0 |
| Blautia schinkii str. 2 | 0 | 1 | 0 | 0 | 0 |
| Blautia sp M25 | 1 | 0 | 0 | 0 | 0 |
| Blautia wexlerae | 1 | 0 | 0 | 0 | 0 |
| Butyrivibrio crossotus | 1 | 4 | 0 | 1 | 0 |
| Clostridiaceae bacterium END 2 | 0 | 1 | 0 | 1 | 0 |
| Clostridiales sp SSC 2 | 1 | 4 | 0 | 1 | 0 |
| Clostridium aldenense | 1 | 1 | 1 | 1 | 0 |
| Clostridium asparagiforme | 0 | 1 | 1 | 0 | 0 |
| Clostridium bartlettii str. 1 | 1 | 2 | 1 | 1 | 0 |
| Clostridium bartlettii str. 2 | 0 | 1 | 1 | 1 | 0 |
| Clostridium bolteae str. 1 | 1 | 3 | 0 | n.d. | n.d. |
| Clostridium bolteae str. 2 | 1 | 1 | 0 | 0 | 1 |
| Clostridium bolteae str. 3 | 0 | 1 | 0 | 0 | 0 |
| Clostridium butyricum str. 1 | 1 | 4 | 0 | 0 | 1 |
| Clostridium butyricum str. 2 | 1 | 4 | 0 | 1 | 1 |
| Clostridium butyricum str. 2 | 1 | 4 | 0 | 1 | 1 |
| Clostridium citroniae | 1 | 4 | 1 | 1 | 1 |
| Clostridium clostridioforme | 1 | 6 | 0 | 0 | 1 |
| Clostridium disporicum | 1 | 0 | 0 | n.d. | n.d. |
| Clostridium ghonii | 1 | 4 | 1 | 1 | 0 |
| Clostridium glycolicum str. 1 | 1 | 2 | 1 | n.d. | n.d. |
| Clostridium glycolicum str. 2 | 1 | 2 | 0 | 0 | 0 |
| Clostridium hathewayi str. 1 | 0 | 1 | 0 | 0 | 0 |
| Clostridium hathewayi str. 2 | 0 | 1 | 0 | 0 | 0 |
| Clostridium hathewayi str. 3 | 0 | 1 | 0 | 0 | 0 |
| Clostridium hylemonae | 0 | 1 | 0 | n.d. | n.d. |
| Clostridium innocuum | 1 | 6 | 0 | n.d. | n.d. |
| Clostridium lactatifermentans | 0 | 1 | 0 | 0 | 0 |
| Clostridium lavalense | 0 | 1 | 1 | 0 | 0 |
| Clostridium leptum | 0 | 1 | 0 | 0 | 0 |
| Clostridium mayombei | 1 | 2 | 1 | 0 | 0 |
| Clostridium nexile | 0 | 1 | 0 | 0 | 0 |
| Clostridium oroticum str. 1 | 1 | 0 | 0 | 0 | 0 |
| Clostridium oroticum str. 2 | 1 | 0 | 0 | n.d. | n.d. |
| Clostridium scindens | 0 | 1 | 0 | 0 | 0 |
| Clostridium sp 7 2 43FAA | 1 | 5 | 0 | 0 | 1 |
| Clostridium sp NML 04A032 | 1 | 4 | 1 | 1 | 0 |
| Clostridium spiroforme str. 1 | 0 | 1 | 0 | 0 | 0 |
| Clostridium spiroforme str .2 | 0 | 1 | 0 | 0 | 0 |
| Clostridium sporogenes str. 1 | 1 | 4 | 1 | 1 | 0 |
| Clostridium sporogenes str. 2 | 1 | 4 | 1 | 1 | 0 |
| Clostridium straminisolvens | 0 | 1 | 0 | 0 | 0 |
| Clostridium subterminale | 1 | 4 | 1 | 1 | 0 |
| Clostridium symbiosum str. 1 | 1 | 4 | 0 | 1 | 0 |
| Clostridium symbiosum str. 2 | 1 | 4 | 0 | 0 | 0 |
| Clostridium tertium | 1 | 5 | 0 | 0 | 1 |
| Clostridium tyrobutyricum | 1 | 6 | 0 | 1 | 1 |
| Clostridium viride str. 1 | 1 | 4 | 0 | 1 | 0 |
| Clostridium viride str. 2 | 1 | 4 | 0 | 1 | 0 |
| Coprobacillus sp D7 str. 1 | 0 | 1 | 0 | 0 | 0 |
| Coprobacillus sp D7 str. 2 | 0 | 1 | 0 | 0 | 0 |
| Coprococcus comes | 1 | 4 | 0 | 1 | 0 |
| Coprococcus eutactus str. 1 | 1 | 1 | 0 | 0 | 0 |
| Coprococcus eutactus str. 2 | 1 | 6 | 0 | 1 | 0 |
| Coriobacteriaceae sp 7 10 1 b | 0 | 1 | 0 | 0 | 0 |
| Dorea formicigenerans str. 1 | 0 | 1 | 0 | 0 | 0 |
| Dorea formicigenerans str. 2 | 0 | 1 | 0 | 0 | 0 |
| Dorea formicigenerans str. 3 | 0 | 1 | 0 | 0 | 0 |
| Dorea formicigenerans str. 4 | 0 | 1 | 0 | 0 | 0 |
| Dorea longicatena str. 1 | 0 | 1 | 0 | 0 | 0 |
| Dorea longicatena str. 2 | 0 | 1 | 0 | 0 | 0 |
| Dorea longicatena str. 3 | 0 | 1 | 0 | 0 | 0 |
| Eggerthella lenta str. 1 | 0 | 1 | 0 | 0 | 0 |
| Eggerthella lenta str. 2 | 0 | 1 | 0 | 0 | 0 |
| Eggerthella lenta str. 3 | 0 | 1 | 0 | 0 | 0 |
| Eggerthella sp 1 3 56FAA | 0 | 1 | 0 | 0 | 0 |
| Erysipelotrichaceae bacterium | 1 | 4 | 0 | 1 | 0 |
| 3 1 53 str. 1 | | | | | |
| Erysipelotrichaceae bacterium | 0 | 1 | 0 | 0 | 0 |
| 3 1 53 str. 2 | | | | | |
| Erysipelotrichaceae bacterium | 1 | 6 | 0 | 0 | 0 |
| 5 2 54FAA | | | | | |
| Eubacterium contortum str. 1 | 1 | 0 | 0 | 0 | 0 |
| Eubacterium contortum str. 2 | 1 | 0 | 0 | n.d. | n.d. |
| Eubacterium desmolans | 1 | 5 | 0 | 1 | 0 |
| Eubacterium dolichum | 1 | 6 | 0 | 0 | 0 |
| Eubacterium hallii | 1 | 0 | 0 | 0 | 0 |
| Eubacterium limosum | 1 | 6 | 0 | 1 | 0 |
| Eubacterium rectale str. 1 | 1 | 5 | 0 | 0 | 1 |
| Eubacterium rectale str. 2 | 1 | 5 | 0 | 0 | 1 |
| Eubacterium siraeum | 0 | 1 | 0 | 0 | 0 |
| Eubacterium sp WAL 14571 | 1 | 4 | 0 | 1 | 0 |
| str. 1 | | | | | |
| Eubacterium sp WAL 14571 | 1 | 4 | 0 | 1 | 0 |
| str. 1 | | | | | |
| Eubacterium tenue | 1 | 3 | 1 | 0 | 0 |
| Eubacterium ventriosum | 0 | 1 | 0 | 0 | 0 |
| Faecalibacterium prausnitzii | 1 | 6 | 0 | 0 | 0 |
| str. 1 | | | | | |
| Faecalibacterium prausnitzii | 1 | 3 | 0 | 0 | 0 |
| str. 2 | | | | | |
| Faecalibacterium prausnitzii | 1 | 3 | 0 | 1 | 0 |
| str. 3 | | | | | |
| Faecalibacterium prausnitzii | 1 | 3 | 0 | 0 | 0 |
| str. 4 | | | | | |
| Faecalibacterium prausnitzii | 0 | 1 | 0 | 0 | 0 |
| str. 5 | | | | | |
| Faecalibacterium prausnitzii | 1 | 6 | 0 | 0 | 1 |
| str. 6 | | | | | |
| Faecalibacterium prausnitzii | 1 | 1 | 0 | 0 | 0 |
| str. 7 | | | | | |
| Flavonifractor plautii str. 1 | 1 | 4 | 1 | 1 | 1 |
| Flavonifractor plautii str. 2 | 1 | 4 | 1 | n.d. | n.d. |
| Gemmiger formicilis str. 1 | 1 | 6 | 0 | 1 | 0 |
| Gemmiger formicilis str. 2 | 1 | 6 | 0 | 0 | 0 |
| Gemmiger formicilis str. 3 | 1 | 6 | 0 | 1 | 0 |
| Hydrogenoanaerobacterium | 0 | 1 | 0 | 0 | 0 |
| saccharovorans | | | | | |
| Lachnospira pectinoschiza | 0 | 1 | 0 | 0 | 0 |
| Lachnospiraceae bacterium 1 | 0 | 1 | 0 | 0 | 0 |
| 4 56FAA | | | | | |
| Lachnospiraceae bacterium 2 | 1 | 0 | 0 | 1 | 0 |
| 1 58FAA | | | | | |
| Lachnospiraceae bacterium 3 | 1 | 4 | 0 | 1 | 0 |
| 1 57FAA str. 1 | | | | | |
| Lachnospiraceae bacterium 3 | 1 | 4 | 0 | 1 | 0 |
| 1 57FAA str. 2 | | | | | |
| Lachnospiraceae bacterium 5 | 0 | 1 | 0 | 0 | 1 |
| 1 57FAA str. 1 | | | | | |
| Lachnospiraceae bacterium 5 | 0 | 1 | 0 | 0 | 1 |
| 1 57FAA str. 2 | | | | | |
| Lachnospiraceae bacterium 5 | 0 | 1 | 0 | 0 | 0 |
| 1 57FAA str. 3 | | | | | |
| Lachnospiraceae bacterium 5 | 0 | 1 | 0 | 0 | 1 |
| 1 57FAA str. 4 | | | | | |
| Lachnospiraceae bacterium 5 | 0 | 1 | 0 | 0 | 1 |
| 1 57FAA str. 5 | | | | | |
| Lachnospiraceae bacterium 6 | 0 | 1 | 0 | 0 | 0 |
| 1 63FAA | | | | | |
| Lachnospiraceae bacterium | 0 | 1 | 0 | 0 | 0 |
| oral taxon F15 str. 1 | | | | | |
| Lachnospiraceae bacterium | 1 | 0 | 0 | 0 | 0 |
| oral taxon F15 str. 2 | | | | | |
| Lachnospiraceae sp 10972 | 1 | 0 | 0 | n.d. | n.d. |
| Lachnospiraceae sp 11041 | 0 | 1 | 0 | n.d. | n.d. |
| Lactobacillus gasseri | 0 | 1 | 0 | 0 | 0 |
| Lactonifactor longoviformis | 0 | 1 | 0 | 0 | 0 |
| Odoribacter splanchnicus | 1 | 4 | 1 | 1 | 0 |
| Oscillibacter valericigenes | 1 | 4 | 0 | 1 | 0 |
| Parabacteroides distasonis | 1 | 3 | 0 | 1 | 0 |
| Roseburia faecalis | 1 | 1 | 0 | 0 | 0 |
| Roseburia hominis str. 1 | 1 | 5 | 0 | 1 | 1 |
| Roseburia hominis str. 2 | 1 | 6 | 0 | 1 | 0 |
| Roseburia intestinalis str. 1 | 1 | 5 | 0 | 0 | 0 |
| Roseburia intestinalis str. 2 | 1 | 5 | 0 | 0 | 1 |
| Roseburia intestinalis str. 3 | 1 | 5 | 0 | 1 | 1 |
| Roseburia intestinalis str. 4 | 1 | 5 | 0 | 1 | 0 |
| Roseburia inulinivorans | 1 | 1 | 0 | 0 | 1 |
| Ruminococcaceae bacterium | 1 | 4 | 0 | 0 | 0 |
| D16 | | | | | |
| Ruminococcus albus | 0 | 1 | 0 | 0 | 0 |
| Ruminococcus bromii str. 1 | 0 | 1 | 0 | 0 | 0 |
| Ruminococcus bromii str. 2 | 0 | 1 | 0 | 0 | 0 |
| Ruminococcus bromii str. 3 | 0 | 1 | 0 | 0 | 0 |
| Ruminococcus gnavus | 0 | 1 | 1 | 0 | 0 |
| Ruminococcus hansenii | 0 | 1 | 0 | 0 | 0 |
| Ruminococcus lactaris str. 1 | 0 | 1 | 0 | 0 | 0 |
| Ruminococcus lactaris str. 2 | 0 | 1 | 0 | 1 | 0 |
| Ruminococcus obeum str. 1 | 1 | 0 | 0 | 0 | 0 |
| Ruminococcus obeum str. 2 | 1 | 0 | 0 | 1 | 0 |
| Ruminococcus obeum str. 3 | 1 | 0 | 0 | 1 | 0 |
| Ruminococcus obeum str. 4 | 1 | 0 | 0 | 0 | 0 |
| Ruminococcus obeum str. 5 | 1 | 0 | 0 | 1 | 0 |
| Ruminococcus sp 5 1 39BFAA | 1 | 0 | 0 | 1 | 0 |
| Ruminococcus sp K-1 | 1 | 0 | 0 | 0 | 0 |
| Ruminococcus torques str. 1 | 0 | 1 | 0 | 0 | 0 |
| Ruminococcus torques str. 2 | 0 | 1 | 0 | 0 | 0 |
| Subdoligranulum variabile | 1 | 6 | 0 | 1 | 0 |
| Turicibacter sanguinis str. 1 | 0 | 1 | 0 | n.d. | n.d. |
| Turicibacter sanguinis str. 2 | 0 | 1 | 0 | 0 | 0 |

TABLE 5
Engraftment Summary

| | SEQ ID NO | Long-Term Engrafter |
|---|---|---|
| | for 16S | (LTE) or Transient |
| Species | Sequence | Engrafter (TE) |
| Acetivibrio unclassified | 258 | LTE |
| Anaerostipes hadrus | 363 | LTE |
| Anaerostipes unclassified | 229 | LTE |
| Anaerotruncus colihominis str. 1 | 230 | TE |
| Anaerotruncus colihominis str. 2 | 232 | TE |
| Anaerotruncus unclassified | 231 | TE |
| Blautia hydrogenotrophica | 238 | LTE |
| Blautia obeum str. 1 | 389 | LTE |
| Blautia obeum str. 2 | 390 | LTE |
| Blautia producta | 239 | TE |
| Blautia unclassified str. 1 | 233 | LTE |
| Blautia unclassified str. 2 | 236 | LTE |
| Blautia unclassified str. 3 | 391 | LTE |
| Blautia wexlerae str. 1 | 240 | LTE |
| Blautia wexlerae str. 2 | 241 | LTE |
| Blautia wexlerae str. 3 | 242 | LTE |
| Blautia wexlerae str. 4 | 243 | LTE |
| Blautia wexlerae str. 5 | 244 | LTE |
| Blautia wexlerae str. 6 | 245 | LTE |
| Blautia wexlerae str. 7 | 246 | LTE |
| Blautia wexlerae str. 8 | 247 | LTE |
| Butyricicoccus unclassified str. 1 | 251 | LTE |
| Butyricicoccus unclassified str. 2 | 259 | LTE |
| Butyricicoccus unclassified str. 3 | 313 | TE |
| Clostridiales unclassified str. 1 | 234 | LTE |
| Clostridiales unclassified str. 2 | 235 | LTE |
| Clostridiales unclassified str. 3 | 302 | TE |
| Clostridium aldenense | 263 | TE |
| Clostridium bolteae str. 1 | 270 | TE |
| Clostridium bolteae str. 2 | 272 | TE |
| Clostridium bolteae str. 3 | 273 | TE |
| Clostridium bolteae str. 4 | 274 | TE |
| Clostridium citroniae | 271 | TE |
| Clostridium innocuum str. 1 | 278 | TE |
| Clostridium innocuum str. 2 | 279 | TE |
| Clostridium innocuum str. 3 | 280 | TE |
| Clostridium innocuum str. 4 | 281 | TE |
| Clostridium innocuum str. 5 | 282 | TE |
| Clostridium innocuum str. 6 | 308 | TE |
| Clostridium innocuum str. 7 | 310 | TE |
| Clostridium innocuum str. 8 | 311 | TE |
| Clostridium innocuum str. 9 | 312 | TE |
| Clostridium lavalense str. 1 | 264 | TE |
| Clostridium lavalense str. 2 | 283 | TE |
| Clostridium leptum str. 1 | 284 | LTE |
| Clostridium leptum str. 2 | 285 | LTE |
| Clostridium paraputrificum | 286 | TE |
| Clostridium perfringens | 287 | TE |
| Clostridium saudiense | 275 | LTE |
| Clostridium scindens | 362 | TE |
| Clostridium subterminale | 290 | TE |
| Clostridium symbiosum | 291 | TE |
| Clostridium unclassified | 237 | LTE |
| Coprobacillus unclassified | 250 | LTE |
| Coprococcus comes | 293 | LTE |
| Coprococcus unclassified | 292 | LTE |
| Dielma fastidiosa | 248 | LTE |
| Dorea formicigenerans str. 1 | 294 | LTE |
| Dorea formicigenerans str. 2 | 295 | LTE |
| Dorea formicigenerans str. 3 | 296 | LTE |
| Dorea formicigenerans str. 4 | 297 | LTE |
| Dorea formicigenerans str. 5 | 298 | LTE |
| Dorea formicigenerans str. 6 | 299 | LTE |
| Dorea longicatena str. 1 | 300 | LTE |
| Dorea longicatena str. 2 | 301 | LTE |
| Eisenbergiella tayi str. 1 | 359 | LTE |
| Eisenbergiella tayi str. 2 | 360 | LTE |
| Eisenbergiella tayi str. 3 | 361 | LTE |
| Erysipelatoclostridium ramosum | 288 | TE |
| Eubacterium eligens str. 1 | 318 | LTE |
| Eubacterium eligens str. 2 | 319 | LTE |
| Eubacterium eligens str. 3 | 320 | LTE |
| Eubacterium eligens str. 4 | 321 | LTE |
| Eubacterium eligens str. 5 | 322 | LTE |
| Eubacterium hallii | 323 | LTE |
| Eubacterium rectale str. 1 | 325 | LTE |
| Eubacterium rectale str. 2 | 326 | LTE |
| Eubacterium rectale str. 3 | 327 | LTE |
| Eubacterium rectale str. 4 | 328 | LTE |
| Eubacterium rectale str. 5 | 329 | LTE |
| Eubacterium siraeum str. 1 | 330 | LTE |
| Eubacterium siraeum str. 2 | 331 | LTE |
| Eubacterium siraeum str. 3 | 332 | LTE |
| Eubacterium siraeum str. 4 | 333 | LTE |
| Eubacterium ventriosum | 339 | LTE |
| Faecalibacterium prausnitzii str. 1 | 340 | LTE |
| Faecalibacterium prausnitzii str. 2 | 341 | LTE |
| Faecalibacterium prausnitzii str. 3 | 342 | LTE |
| Faecalibacterium prausnitzii str. 4 | 343 | LTE |
| Faecalibacterium prausnitzii str. 5 | 344 | LTE |
| Faecalibacterium prausnitzii str. 6 | 345 | LTE |
| Faecalicatena contorta str. 1 | 314 | TE |
| Faecalicatena contorta str. 2 | 315 | TE |
| Faecalicatena contorta str. 3 | 316 | TE |
| Faecalicatena contorta str. 4 | 317 | TE |
| Firmicutes unclassified str. 1 | 303 | TE |
| Firmicutes unclassified str. 2 | 304 | TE |
| Firmicutes unclassified str. 3 | 305 | TE |
| Firmicutes unclassified str. 4 | 306 | TE |
| Firmicutes unclassified str. 5 | 307 | TE |
| Firmicutes unclassified str. 6 | 309 | TE |
| Flavonifractor plautii str. 1 | 348 | LTE |
| Flavonifractor plautii str. 2 | 364 | LTE |
| Fusicatenibacter saccharivorans | 349 | LTE |
| Gemmiger formicilis | 350 | LTE |
| Holdemania filiformis | 352 | LTE |
| Hungatella effluvii str. 1 | 276 | TE |
| Hungatella effluvii str. 2 | 277 | TE |
| Intestinibacter bartlettii str. 1 | 265 | LTE |
| Intestinibacter bartlettii str. 2 | 266 | LTE |
| Intestinibacter bartlettii str. 3 | 267 | LTE |
| Intestinibacter bartlettii str. 4 | 268 | LTE |
| Intestinibacter bartlettii str. 5 | 269 | LTE |
| Intestinimonas butyriciproducens | 353 | LTE |
| Lachnoclostridium pacaense | 249 | TE |
| Lachnospiraceae unclassified str. 1 | 228 | LTE |
| Lachnospiraceae unclassified str. 2 | 252 | LTE |
| Lachnospiraceae unclassified str. 3 | 253 | LTE |
| Lachnospiraceae unclassified str. 4 | 254 | LTE |
| Lachnospiraceae unclassified str. 5 | 255 | LTE |
| Lachnospiraceae unclassified str. 6 | 256 | LTE |
| Lachnospiraceae unclassified str. 7 | 260 | LTE |
| Lachnospiraceae unclassified str. 8 | 289 | LTE |
| Lachnospiraceae unclassified str. 9 | 354 | LTE |
| Lachnospiraceae unclassified str. 10 | 381 | LTE |
| Lactobacillus rogosae | 355 | LTE |
| Lactonifactor unclassified | 366 | TE |
| Longicatena caecimuris str. 1 | 334 | LTE |
| Longicatena caecimuris str. 2 | 335 | LTE |
| Longicatena caecimuris str. 3 | 336 | LTE |
| Longicatena caecimuris str. 4 | 337 | LTE |
| Longicatena caecimuris str. 5 | 338 | LTE |
| Oscillibacter unclassified | 367 | LTE |
| Robinsoniella unclassified | 257 | LTE |
| Roseburia faecis | 368 | LTE |
| Roseburia hominis str. 1 | 369 | LTE |
| Roseburia hominis str. 2 | 370 | LTE |
| Roseburia hominis str. 3 | 371 | LTE |
| Roseburia hominis str. 4 | 372 | LTE |
| Roseburia inulinivorans | 374 | LTE |
| Roseburia unclassified str. 1 | 324 | LTE |
| Roseburia unclassified str. 2 | 373 | LTE |
| Roseburia unclassified str. 3 | 375 | LTE |
| Ruminococcaceae unclassified str. 1 | 261 | LTE |
| Ruminococcaceae unclassified str. 2 | 262 | TE |
| Ruminococcaceae unclassified str. 3 | 346 | LTE |
| Ruminococcaceae unclassified str. 4 | 347 | LTE |
| Ruminococcaceae unclassified str. 5 | 376 | LTE |
| Ruminococcus bromii | 383 | LTE |
| Ruminococcus gnavus str. 1 | 357 | LTE |
| Ruminococcus gnavus str. 2 | 384 | LTE |
| Ruminococcus gnavus str. 3 | 385 | LTE |
| Ruminococcus gnavus str. 4 | 386 | LTE |
| Ruminococcus gnavus str. 5 | 387 | LTE |
| Ruminococcus gnavus str. 6 | 388 | LTE |
| Ruminococcus torques str. 1 | 356 | LTE |
| Ruminococcus torques str. 2 | 358 | LTE |
| Ruminococcus torques str. 3 | 365 | LTE |
| Ruminococcus torques str. 4 | 392 | LTE |
| Ruminococcus torques str. 5 | 393 | LTE |
| Ruminococcus torques str. 6 | 394 | LTE |
| Ruminococcus torques str. 7 | 395 | LTE |
| Ruminococcus torques str. 8 | 396 | LTE |
| Ruminococcus torques str. 9 | 397 | LTE |
| Ruminococcus unclassified str. 1 | 377 | TE |
| Ruminococcus unclassified str. 2 | 378 | TE |
| Ruminococcus unclassified str. 3 | 379 | TE |
| Ruminococcus unclassified str. 4 | 380 | TE |
| Ruminococcus unclassified str. 5 | 382 | LTE |
| Ruthenibacteriumlactatiformans | 398 | TE |
| Subdoligranulum unclassified | 351 | LTE |

TABLE 6
Designed Bacterial Compositions (DE1 and DE3-DE12) Properties

| | | | DE0021 | | | | | | | DE4058 |
|---|---|---|---|---|---|---|---|---|---|---|
| | | | 65.1 | DE4641 | | | | | DE5598 | 16.1 |
| | | DE9846 | (DE4) | 67.1 | DE5222 | DE2470 | DE3494 | DE6984 | 46.1 | (DE12) |
| | DE2860 | 62.1 | de1- | (DE5) | 92.1 | 30.1 | 41.1 | 78.1 | (DE11) | de287- |
| | 37.1 | (DE3) | core- | de1- | (DE6) | (DE7) | (DE8) | (DE10) | de1- | 3mer1 |
| DE | (DE1) | de1- | plus- | pheno- | de 2873- | de 2873- | de 2876- | new- | modNew- | modNew- |
| Alias | de1 | core | pstrep | core | mer1 | mer2 | mer | core | Core | Core |
| HDAC | 2 | 1 | 1 | 1 | 1 | 1 | 1 | 1 | 1 | 1 |
| cluster 0 | | | | | | | | | | |
| HDAC | 4 | 0 | 1 | 0 | 3 | 4 | 2 | 2 | 4 | 4 |
| cluster 1 | | | | | | | | | | |
| HDAC | 1 | 0 | 0 | 0 | 0 | 0 | 0 | 0 | 0 | 0 |
| cluster 2 | | | | | | | | | | |
| HDAC | 1 | 0 | 0 | 0 | 0 | 0 | 0 | 0 | 1 | 0 |
| cluster 3 | | | | | | | | | | |
| HDAC | 5 | 2 | 2 | 3 | 8 | 5 | 7 | 1 | 5 | 8 |
| cluster 4 | | | | | | | | | | |
| HDAC | 0 | 0 | 0 | 0 | 0 | 0 | 0 | 0 | 0 | 0 |
| cluster 5 | | | | | | | | | | |
| HDAC | 1 | 0 | 0 | 0 | 0 | 2 | 2 | 0 | 1 | 0 |
| cluster 6 | | | | | | | | | | |
| HDAC | 11 | 3 | 4 | 4 | 10 | 9 | 11 | 3 | 10 | 11 |
| inhibition | | | | | | | | | | |
| Propanoic | 5 | 0 | 1 | 3 | 2 | 3 | 2 | 1 | 3 | 2 |
| acid | | | | | | | | | | |
| Butanoic | 5 | 1 | 2 | 2 | 6 | 4 | 6 | 1 | 4 | 6 |
| acid | | | | | | | | | | |
| Pentanoic | 1 | 1 | 2 | 0 | 2 | 1 | 2 | 0 | 1 | 2 |
| acid | | | | | | | | | | |
| Hexanoic | 2 | 1 | 1 | 0 | 3 | 2 | 2 | 0 | 1 | 2 |
| acid | | | | | | | | | | |
| Indole | 1 | 1 | 1 | 3 | 1 | 1 | 1 | 2 | 3 | 3 |
| 3-methyl | 2 | 0 | 1 | 1 | 4 | 3 | 5 | 1 | 2 | 4 |
| indole | | | | | | | | | | |
| 3- | 0 | 0 | 1 | 0 | 0 | 0 | 0 | 0 | 0 | 0 |
| indoleacry- | | | | | | | | | | |
| lic acid | | | | | | | | | | |
| BSH gCA | 13 | 2 | 3 | 3 | 11 | 11 | 11 | 4 | 12 | 13 |
| BSH tCA | 11 | 1 | 1 | 2 | 10 | 10 | 10 | 3 | 9 | 11 |
| BSH | 9 | 1 | 1 | 2 | 8 | 8 | 9 | 3 | 7 | 9 |
| gCDCA | | | | | | | | | | |
| BSH | 10 | 1 | 1 | 2 | 9 | 9 | 9 | 3 | 8 | 10 |
| tCDCA | | | | | | | | | | |
| 7aD CA | 6 | 2 | 2 | 1 | 5 | 5 | 4 | 1 | 4 | 4 |
| 7aD | 0 | 0 | 0 | 0 | 0 | 0 | 0 | 1 | 1 | 1 |
| CDCA | | | | | | | | | | |
| 7bHSDH | 1 | 0 | 1 | 0 | 0 | 0 | 0 | 0 | 0 | 0 |
| UDCA | | | | | | | | | | |
| Catalase | 0 | 0 | 0 | 0 | 1 | 0 | 1 | 1 | 1 | 2 |
| a-L- | 3 | 1 | 1 | 0 | 2 | 2 | 1 | 1 | 1 | 1 |
| Fucosidase | | | | | | | | | | |
| IL8 | 0 | 0 | 0 | 0 | 0 | 0 | 0 | 0 | 0 | 0 |
| Inflam- | | | | | | | | | | |
| matory | | | | | | | | | | |
| LTE | 1 | 0 | 0 | 3 | 1 | 4 | 4 | 1 | 2 | 2 |
| TE | 7 | 2 | 2 | 1 | 8 | 5 | 7 | 3 | 10 | 11 |
| Remission | 2 | 0 | 0 | 0 | 2 | 1 | 3 | 0 | 2 | 2 |
| Associated | | | | | | | | | | |
| NonRe- | 1 | 1 | 1 | 1 | 1 | 1 | 1 | 1 | 2 | 2 |
| mission | | | | | | | | | | |
| Associated | | | | | | | | | | |

TABLE 7
Designed Bacterial Compositions (DE13-DE19 and DE21-DE23) Properties

| | | | | | | | | | | DE6089 |
|---|---|---|---|---|---|---|---|---|---|---|
| | | | | | | DE2117 | | | | 59.1 |
| | | | | | DE1247 | 14.1 | | | DE2911 | (DE17) |
| | DE0562 | DE3908 | | DE5048 | 02.1 | (DE19) | | | 14.1 | t1eff- |
| | 80.1 | 74.1 | DE2995 | 74.1 | (DE18) | t1eff- | | DE7879 | (DE23) | s287- |
| | (DE13) | (DE14) | 61.1 | (DE16) | t1eff- | s287- | DE7627 | 51.1 | maxeff- | isolate- |
| | de287- | de287- | (DE15) | t1eff- | s287- | isolate- | 08.1 | (DE22) | s287- | plus- |
| | 3mer2- | 6mer- | t1eff- | s287- | isolate- | plusCore- | (DE21) | maxeff- | isolate- | Core |
| DE | modNew- | modNew- | s287- | isolate- | plusCore- | maxHD- | max- | s287- | plus- | sppClus- |
| Alias | Core | Core | isolate | plusCore | allTryp | AC0 | sppeff | isolate | Core | ter1 |
| HDAC | 1 | 1 | 1 | 2 | 2 | 4 | 1 | 1 | 2 | 2 |
| cluster 0 | | | | | | | | | | |
| HDAC | 4 | 3 | 2 | 4 | 5 | 4 | 5 | 3 | 5 | 5 |
| cluster 1 | | | | | | | | | | |
| HDAC | 0 | 0 | 0 | 0 | 1 | 0 | 0 | 0 | 0 | 0 |
| cluster 2 | | | | | | | | | | |
| HDAC | 0 | 0 | 0 | 0 | 0 | 0 | 1 | 0 | 0 | 0 |
| cluster 3 | | | | | | | | | | |
| HDAC | 5 | 8 | 2 | 3 | 6 | 3 | 3 | 3 | 4 | 4 |
| cluster 4 | | | | | | | | | | |
| HDAC | 0 | 0 | 0 | 0 | 0 | 0 | 1 | 1 | 1 | 1 |
| cluster 5 | | | | | | | | | | |
| HDAC | 2 | 2 | 1 | 1 | 1 | 1 | 4 | 3 | 3 | 2 |
| cluster 6 | | | | | | | | | | |
| HDAC | 10 | 13 | 4 | 7 | 11 | 9 | 10 | 8 | 11 | 10 |
| inhibition | | | | | | | | | | |
| Propanoic | 3 | 3 | 1 | 2 | 3 | 2 | 4 | 3 | 4 | 4 |
| acid | | | | | | | | | | |
| Butanoic | 4 | 7 | 3 | 4 | 6 | 4 | 6 | 5 | 6 | 5 |
| acid | | | | | | | | | | |
| Pentanoic | 1 | 2 | 0 | 0 | 1 | 0 | 1 | 1 | 1 | 0 |
| acid | | | | | | | | | | |
| Hexanoic | 1 | 2 | 0 | 0 | 1 | 0 | 1 | 1 | 1 | 0 |
| acid | | | | | | | | | | |
| Indole | 3 | 3 | 0 | 2 | 4 | 2 | 1 | 0 | 2 | 2 |
| 3-methyl | 2 | 5 | 3 | 4 | 5 | 4 | 6 | 5 | 6 | 5 |
| indole | | | | | | | | | | |
| 3- | 0 | 0 | 0 | 0 | 0 | 0 | 0 | 0 | 0 | 0 |
| indolea- | | | | | | | | | | |
| crylic acid | | | | | | | | | | |
| BSH gCA | 12 | 14 | 5 | 9 | 14 | 11 | 14 | 10 | 14 | 13 |
| BSH tCA | 10 | 12 | 5 | 8 | 12 | 8 | 12 | 10 | 13 | 12 |
| BSH | 8 | 11 | 5 | 8 | 12 | 8 | 11 | 9 | 12 | 10 |
| gCDCA | | | | | | | | | | |
| BSH | 9 | 11 | 5 | 8 | 12 | 8 | 12 | 10 | 13 | 11 |
| tCDCA | | | | | | | | | | |
| 7aD CA | 4 | 4 | 0 | 1 | 2 | 1 | 0 | 0 | 1 | 2 |
| 7aD | 1 | 1 | 0 | 1 | 1 | 1 | 0 | 0 | 1 | 1 |
| CDCA | | | | | | | | | | |
| 7bHSDH | 0 | 0 | 0 | 0 | 0 | 0 | 0 | 0 | 0 | 0 |
| UDCA | | | | | | | | | | |
| Catalase | 1 | 2 | 1 | 2 | 2 | 2 | 1 | 1 | 2 | 2 |
| a-L- | 1 | 1 | 1 | 2 | 2 | 3 | 1 | 1 | 2 | 2 |
| Fucosidase | | | | | | | | | | |
| IL8 | 0 | 0 | 0 | 0 | 0 | 0 | 0 | 0 | 0 | 0 |
| Inflam- | | | | | | | | | | |
| matory | | | | | | | | | | |
| LTE | 4 | 4 | 4 | 5 | 6 | 5 | 7 | 7 | 8 | 8 |
| TE | 8 | 10 | 2 | 5 | 9 | 5 | 7 | 3 | 6 | 5 |
| Remission | 0 | 2 | 4 | 4 | 4 | 4 | 7 | 5 | 5 | 4 |
| Associated | | | | | | | | | | |
| NonRe- | 2 | 2 | 0 | 1 | 2 | 1 | 0 | 0 | 1 | 1 |
| mission | | | | | | | | | | |
| Associated | | | | | | | | | | |

TABLE 8
Designed Bacterial Compositions (DE20, DE24-DE30, DE32 and DE33) Properties

| | DE313 | | | DE6167 | | | | | | |
|---|---|---|---|---|---|---|---|---|---|---|
| | 669.1 | | DE3434 | 87.1 | | DE0555 | DE0338 | DE8651 | | DE4335 |
| | (DE20) | DE0708 | 82.1 | (DE25) | DE0688 | 48.1 | 49.1 | 06.1 | DE7792 | 98.1 |
| | t1eff- | 75.1 | (DE26) | 15merw- | 51.1 | (DE28) | (DE27) | (DE29) | 49.1 | (DE33) |
| | s287- | (DE24) | 15merw- | Redun- | (DE30) | 15merw- | 15merw- | 15merw- | (DE32) | 18merw- |
| | isolate- | 15merw- | Redun- | dancy- | 15merw- | Redun- | Redun- | Redun- | 18merw- | Redun- |
| | plusCore- | Redun- | dancy- | max3veg- | Redun- | dancy- | dancy- | dancy- | Redun- | dnancy- |
| DE | maxHD- | dancy- | max3veg- | maxPro- | dancy- | max5veg- | max3veg- | max5veg- | dancy- | max5veg- |
| Alias | ACDiv | distant | maxSpore | pionate | maxT1Eff | maxSkatol | maxT1Eff | maxT1Eff | maxT1Eff | maxT1Eff |
| HDAC | 2 | 2 | 2 | 2 | 2 | 2 | 2 | 2 | 2 | 2 |
| cluster 0 | | | | | | | | | | |
| HDAC | 4 | 3 | 2 | 3 | 5 | 4 | 2 | 4 | 5 | 5 |
| cluster 1 | | | | | | | | | | |
| HDAC | 1 | 1 | 1 | 1 | 0 | 1 | 1 | 0 | 1 | 0 |
| cluster 2 | | | | | | | | | | |
| HDAC | 1 | 1 | 1 | 1 | 1 | 0 | 1 | 1 | 1 | 1 |
| cluster 3 | | | | | | | | | | |
| HDAC | 3 | 6 | 7 | 6 | 4 | 6 | 6 | 5 | 6 | 7 |
| cluster 4 | | | | | | | | | | |
| HDAC | 2 | 0 | 0 | 0 | 0 | 0 | 0 | 0 | 0 | 0 |
| cluster 5 | | | | | | | | | | |
| HDAC | 2 | 2 | 2 | 2 | 3 | 2 | 3 | 3 | 3 | 3 |
| cluster 6 | | | | | | | | | | |
| HDAC | 12 | 12 | 14 | 13 | 11 | 13 | 14 | 12 | 13 | 14 |
| inhibition | | | | | | | | | | |
| Propanoic | 6 | 7 | 5 | 7 | 4 | 5 | 6 | 4 | 6 | 5 |
| acid | | | | | | | | | | |
| Butanoic | 6 | 7 | 8 | 8 | 7 | 9 | 8 | 7 | 9 | 8 |
| acid | | | | | | | | | | |
| Pentanoic | 0 | 2 | 2 | 2 | 2 | 2 | 2 | 2 | 2 | 2 |
| acid | | | | | | | | | | |
| Hexanoic | 0 | 2 | 2 | 2 | 2 | 2 | 2 | 2 | 2 | 2 |
| acid | | | | | | | | | | |
| Indole | 2 | 4 | 3 | 4 | 3 | 4 | 4 | 3 | 3 | 5 |
| 3- | 6 | 5 | 7 | 6 | 6 | 8 | 6 | 7 | 8 | 6 |
| methyl | | | | | | | | | | |
| indole | | | | | | | | | | |
| 3- | 0 | 0 | 0 | 0 | 0 | 0 | 0 | 0 | 0 | 0 |
| indolea | | | | | | | | | | |
| crylic | | | | | | | | | | |
| acid | | | | | | | | | | |
| BSH | 14 | 13 | 13 | 13 | 13 | 12 | 13 | 13 | 16 | 16 |
| gCA | | | | | | | | | | |
| BSH | 13 | 9 | 10 | 10 | 11 | 9 | 10 | 11 | 13 | 12 |
| tCA | | | | | | | | | | |
| BSH | 12 | 9 | 10 | 10 | 11 | 9 | 10 | 11 | 13 | 12 |
| gCDCA | | | | | | | | | | |
| BSH | 13 | 9 | 10 | 10 | 11 | 9 | 10 | 11 | 13 | 12 |
| tCDCA | | | | | | | | | | |
| 7aD CA | 1 | 1 | 1 | 1 | 1 | 1 | 1 | 1 | 1 | 1 |
| 7aD | 1 | 1 | 1 | 1 | 1 | 1 | 1 | 1 | 1 | 1 |
| CDCA | | | | | | | | | | |
| 7bHSD | 0 | 0 | 0 | 0 | 0 | 0 | 0 | 0 | 0 | 0 |
| H UDCA | | | | | | | | | | |
| Catalase | 2 | 1 | 2 | 2 | 1 | 1 | 1 | 1 | 1 | 1 |
| a-L- | 2 | 1 | 1 | 0 | 1 | 0 | 0 | 0 | 1 | 2 |
| Fucosid | | | | | | | | | | |
| ase | | | | | | | | | | |
| IL8 | 0 | 0 | 0 | 0 | 0 | 0 | 0 | 0 | 0 | 0 |
| Inflann | | | | | | | | | | |
| nnatory | | | | | | | | | | |
| LTE | 7 | 9 | 7 | 7 | 9 | 8 | 8 | 8 | 12 | 10 |
| TE | 7 | 6 | 8 | 8 | 6 | 7 | 7 | 7 | 6 | 8 |
| Remission | | | | | | | | | | |
| Associated | 5 | 4 | 5 | 4 | 8 | 5 | 5 | 7 | 9 | 7 |
| NonRe- | 1 | 0 | 0 | 0 | 0 | 0 | 0 | 0 | 0 | 0 |
| mission | | | | | | | | | | |
| Associated | | | | | | | | | | |

TABLE 9
Designed Bacterial Compositions (DE2, DE9, DE31, and DE34-DE38) Properties

| | DE502105.1 | DE26638 | DE27844 | | | DE34689 | DE93504 | |
|---|---|---|---|---|---|---|---|---|
| | (DE31) | 6.1 | 2.1 | | DE53317 | 7.1 | 5.1 | |
| | 18mer- | (DE34) | (DE35) | DE82195 | 5.1 | (DE36) | (DE37) | DE92422 |
| DE | wRedun- | common- | mega- | 6.1 (DE9) | (DE38) | 23mer- | 18mer- | 1.1 (DE2) |
| Alias | dancy distant | 20mer | 24mer | lousyde | lousierde | swaps | swaps | de2 |
| HDAC | 2 | 2 | 2 | 1 | 1 | 2 | 2 | 2 |
| cluster 0 | | | | | | | | |
| HDAC | 6 | 4 | 9 | 3 | 3 | 7 | 4 | 2 |
| cluster 1 | | | | | | | | |
| HDAC | 1 | 1 | 1 | 0 | 0 | 1 | 0 | 2 |
| cluster 2 | | | | | | | | |
| HDAC | 1 | 1 | 1 | 0 | 0 | 1 | 1 | 3 |
| cluster 3 | | | | | | | | |
| HDAC | 6 | 6 | 8 | 1 | 1 | 8 | 7 | 3 |
| cluster 4 | | | | | | | | |
| HDAC | 0 | 0 | 0 | 1 | 2 | 0 | 0 | 0 |
| cluster 5 | | | | | | | | |
| HDAC | 2 | 3 | 3 | 0 | 1 | 4 | 4 | 1 |
| cluster 6 | | | | | | | | |
| HDAC | 14 | 14 | 17 | 3 | 5 | 18 | 15 | 12 |
| inhibition | | | | | | | | |
| Propanoic | 7 | 6 | 7 | 0 | 0 | 7 | 6 | 6 |
| acid | | | | | | | | |
| Butanoic | 9 | 8 | 11 | 0 | 0 | 12 | 9 | 3 |
| acid | | | | | | | | |
| Pentanoic | 2 | 2 | 2 | 0 | 0 | 1 | 1 | 1 |
| acid | | | | | | | | |
| Hexanoic | 2 | 2 | 2 | 0 | 0 | 1 | 1 | 1 |
| acid | | | | | | | | |
| Indole | 5 | 4 | 5 | 0 | 0 | 5 | 5 | 9 |
| 3-methyl | 8 | 6 | 10 | 0 | 0 | 10 | 6 | 1 |
| indole | | | | | | | | |
| 3- | 0 | 0 | 0 | 0 | 0 | 0 | 0 | 0 |
| indoleacrylic | | | | | | | | |
| acid | | | | | | | | |
| BSH gCA | 15 | 15 | 21 | 1 | 1 | 20 | 16 | 7 |
| BSH tCA | 12 | 12 | 17 | 1 | 1 | 14 | 10 | 5 |
| BSH gCDCA | 12 | 12 | 17 | 1 | 1 | 15 | 11 | 6 |
| BSH tCDCA | 12 | 12 | 17 | 1 | 1 | 15 | 11 | 6 |
| 7aD CA | 1 | 1 | 1 | 0 | 0 | 1 | 1 | 0 |
| 7aD CDCA | 1 | 1 | 1 | 0 | 0 | 1 | 1 | 0 |
| 7bHSDH | 0 | 0 | 0 | 0 | 0 | 0 | 0 | 1 |
| UDCA | | | | | | | | |
| Catalase | 1 | 1 | 2 | 0 | 0 | 2 | 1 | 1 |
| a-L- | 0 | 1 | 2 | 0 | 0 | 1 | 1 | 3 |
| Fucosidase | | | | | | | | |
| IL8 | 0 | 0 | 0 | 3 | 5 | 0 | 0 | 0 |
| Inflannnnatory | | | | | | | | |
| LTE | 9 | 10 | 14 | 1 | 1 | 14 | 11 | 2 |
| TE | 9 | 7 | 10 | 1 | 2 | 9 | 7 | 2 |
| Remission | 6 | 7 | 9 | 1 | 1 | 9 | 7 | 0 |
| Associated | | | | | | | | |
| NonRennission | 0 | 0 | 0 | 0 | 0 | 0 | 0 | 1 |
| Associated | | | | | | | | |

[0410] This PCT application claims the priority benefit of U.S. Provisional Application No. 62/676,236, filed May 24, 2018, which is incorporated herein by reference in its entirety.

The application's sequence listing, which the Patent Office published only in electronic form, follows.

SEQUENCE LISTING (398 sequences)

SEQ ID NO: 1 - DNA, 1253 bp, Artificial Sequence
  Clostridium_bolteae
  misc_feature (207)..(207): n is a, c, g, or t
cgtgtataccctgcctcactgtgggggataacagttaaaagtgagtgctaataccgcataagcgcacagtaccgcgtggtacggtgtgaaaaactccggtggtgtgagatggatccgcgtctgattaccctggtgggggggtaacggccccccaaagcgactatcaatacccgacctgagagggtgaccggccactttgggactganacacggcccactctcctacgggaggcagcagtggggaatattgcacagtgggagaaagcctgatgcagccaccccgcgtgagtgaaaatttcgaaggaaaaaatgacggcctgataaaaccccggctaactacgtgccagcaccgcggtaatactagggggcaagcgttatccggatttactgggtgtaaagggagcgtaacggcaacagtctgaagtgaaaacccgggctcaccctggactgctttggaaactgttttgctagagtgtcgagaggtaagtgattcctagtgtagcggtgatgcgtaatattagagaacaccagtggcagcggcttactgtacgataactgacattgacgctcaagagcgtggagagcaaacgagattaaataccctggtaatccacgccgtacaccatgagtgctacgtgttggggggcaaagcccttcggtgccgtcgcaaacgcagtaagcattccacctggggagtacgttcgcaagaatgaaactcaaaggaattgacggggacccgcacaagcggtggagcatgtggtttaattcgaagcaacgcgaagaaccttaccaagtcttgacatcctcttgaccggcgtgtaacggcgccttcccttcggggcaagagagacaggtggtgcatggttgtcgtcagctcgtgtcgtgagatgttgggttaagtcccgcaacgagcgcaacccttatccttagtagccagcaggtagagctgggcactctagggagactgccagggataacctggaggaaggtggggatgacgtcaaatcatcatgccccttatgatttgggctacacacgtgctacaatggcgtaaacaaagggaagcaagacagtgatgtggagcaaatcccaaaaataacgtcccagttcggactgtagtctgcaacccgactacacgaagctggaatcgctagtaatcgcgaatcagaatgtcgcggtgaatacgttcccgggtcttgtacacaccgcccgtcacaccatgggagtcagcaacgcccgaagtcagtgaccca

SEQ ID NO: 2 - DNA, 1361 bp, Artificial Sequence
  Clostridium_innocuum
agcttgcttccaaagagacttagtggcgaacgggtgagtaacacgtaggtaacctgcccatgtgtccgggataactgctggaaacggtagctaaaaccggataggtatacagagcgcatgctcagtatattaaagcgcccttcaaggcgtgaacatggatggacctgcggcgcattagctagttggtgaggtaacggcccaccaaggcaatgatgcgtagccggcctgagagggtaaacggccacattgggactgagacacggcccaaactcctacgggaggcagcagtagggaattttcgtcaatgggggaaaccctgaacgagcaatgccgcgtgagtgaagaaggtcttcggatcgtaaagctctgttgtaagtgaagaacggctcatagaggaaatgctatgggagtgacggtagcttaccagaaagccacggctaactacgtgccagcagccgcggtaatacgtaggtggcaagcgttatccggaatcattgggcgtaaagggtgcgtaggtggcgtactaagtctgtagtaaaaggcaatggctcaaccattgtaagctatggaaactggtatgctggagtgcagaagagggcgatggaattccatgtgtagcggtaaaatgcgtagatatatggaggaacaccagtggcgaaggcggtcgcctggtctgtaactgacactgaggcacgaaagcgtggggagcaaataggattagataccctagtagtccacgccgtaaacgatgagaactaagtgttggaggaattcagtgctgcagttaacgcaataagttctccgcctggggagtatgcacgcaagtgtgaaactcaaaggaattgacgggggcccgcacaagcggtggagtatgtggtttaattcgaagcaacgcgaagaatcttaccaggccttgacatggaaacaaataccctagagatagggggataattatggatcacacaggtggtgcatggttgtcgtcagctcgtgtcgtgagatgttgggttaagtcccgcaacgagcgcaacccttgtcgcatgttaccagcatcaagttggggactcatgcgagactgccggtgacaaaccggaggaaggtggggatgacgtcaaatcatcatgccccttatggcctgggctacacacgtactacaatggcgaccacaaagagcagcgacacagtgatgtgaagcgaatctcataaaggtcgtctcagttcggattgaagtctgcaactcgacttcatgaagtcggaatcgctagtaatcgcagatcagcatgctgcggtgaatacgttctcgggccttgtacacaccgcccgtcaaaccatgggagtcagtaatacccgaagccggtggc

SEQ ID NO: 3 - DNA, 1334 bp, Artificial Sequence
  Clostridium_viride
gtcgaacggagcacccctgacggagttttcggacaacgaaagggaatgcttagtggcggacgggtgagtaacgcgtgagtaacctgccttggagtggggaataacagccggaaacggctgctaataccgcatgatgtatctggatcgcatggttctggataccaaagatttatcgctctgagatggactcgcgtctgattagctagttggtgaggtaatggctcaccaaggcgacgatcagtagccggactgagaggttggccggccacattgggactgagacacggcccagactcctacgggaggcagcagtggggaatattgggcaatgggcgaaagcctgacccagcaacgccgcgtgaaggaagaaggccctcgggttgtaaacttcttttgtcaggcgaacaagtgcggacctgcaataaccacggctaactacgtgccagcagccgcggtaatacgtaggtggcaagcgttatccggatttactgggtgtaaagggcgtgtaggcgggagtgcaagtcagatgtgaaaactatgggctcaacccatagcctgcatttgaaactgtacttcttgagtgatggagaggcaggcggaattccctgtgtagcggtgaaatgcgtagatatagggaggaacaccagtggcgaaggcggcctgctggacattaactgacgctgagcgcgaaagcgtggggagcaaacaggattagataccctggtagtccacgccgtaaacgatggatactaggtgtggggggtctgaccccctccgtgccgcagttaacacaataagtatcccacctggggagtacgatcgcaaggttgaaactcaaaggaattgacgggggcccgcacaagcggtggagtatgtggtttaattcgaagcaacgcgaagaaccttaccaggacttgacatcctactaacgaagcagatatgcatagatggccatgcgggcaaaattccctgtgtagcggtgagatgcgtagatatagggaggaacaccagtggggttaagtcccgcaacgagcgcaacccttattgttagttgctacgcaagagcactctagcgagactgccgttgacaaaacggaggaaggtggggacgacgtcaaatcatcatgccccttatgtcctgggccacacacgtactacaatggcggtcaacagagggaagcaaagccgcgaggtggagcaaatccctaaaagccgtcccagttcggattgcaggctgaaactcgcctgtatgaagtcggaatcgctagtaatcgcggatcagcatgccgcggtgaatacgttcccgggccttgtacacaccgcccgtcacacca

SEQ ID NO: 4 - DNA, 962 bp, Artificial Sequence
  Anaerotruncus_colihominis
  misc_feature (27)..(27): n is a, c, g, or t
  misc_feature (747)..(747): n is a, c, g, or t
  misc_feature (865)..(865): n is a, c, g, or t
  misc_feature (937)..(937): n is a, c, g, or t
  misc_feature (939)..(939): n is a, c, g, or t
cttacgttttgaagttttcggatggangaatgtaagcttagtggcggacgggtgagtaacacgtgagcaacctgcctttcagagggggataacagccggaaacggctgctaataccgcatgatgttgcgggggcacatgcccctgcaaccaaaggagcaatccgctgaaagatgggctcgcgtccgattagccagttggcggggtaacggcccaccaaagcgacgatcggtagccggactgagaggttgaacggccacattgggactgagacacggcccagactcctacgggaggcagcagtgggggatattgcacaatgggcgaaagcctgatgcagcgacgccgcgtgagggaagacggtcttcggattgtaaacctctgtctttggggaagaaaatgacggtacccaaagaggaagctccggctaactacgtgccagcagccgcggtaatacgtagggagcaagcgttgtccggaattactgggtgtaaagggagcgtaggcgggatggcaagtagaatgttaaatccatcggctcaaccggtggctgcgttctaaactgccgttcttgagtgaagtagaggcaggcggaattcctagtgtagcggtgaaatgcgtagatattaggaggaacaccagtggcgaaggcggcctgctgggctttaactgacgctgaggctcgaaagcgtggggagcaaacaggattagataccctggtagtccacgccgtaaacgatgattactangtgtgggggggactgaccccttccgtgccgcagttaacacaataagtaatccacctggggagtacggccgcaaggttgaaactcaaaggaattgacgggggcccgcacaagcagtggngtatgtggtttaattcgaagcaacgcgaagaaccttaccaggtcttgacatcggatgcatagcctagagatngntgaagccctttcggggcatccag

SEQ ID NO: 5 - DNA, 1249 bp, Artificial Sequence
  Clostridium_glycolicum
ttcggagaagagcggcggacgggtgagtaacgcgtgggtaacctgcctcatacacatggataacataccgaaaggtatgctaatacaggataacataagagattcgcatgtttctcttatcaaagctccggcggtatgagatggacccgcgtctgattagctagttggtaaggtaatggcttaccaaggcgacgatcagtagccgacctgagagggtgatcggccacattggaactgagacacggtccaaactcctacgggaggcagcagtggggaatattgcacaatgggcgaaagcctgatgcagcaacgccgcgtgagtgatgaaggccttcgggtcgtaaaactctgtcctcaaggaagataatgacggtacttgaggaggaagccccggctaactacgtgccagcagccgcggtaatacgtagggggctagcgttatccggatttactgggcgtaaagggtgcgtaggtggtttcttaagtcaggagtgaaaggctacggcttaaccgtagtaagctcttgaaactgggaaacttgagtgcaggagaggaaagtggaattcctagtgtagcggtgaaatgcgtagatattaggaggaacaccagtagcgaaggcggctttctggactgtaactgacactgaggcacgaaagcgtggggagcaaacaggattagataccctggtagtccacgccgtaaacgatgagtactaggtgtcgggggttacccccctcggtgccgcagctaacgcattaagtactccgcctggggagtacgctcgcaagagtgaaactcaaaggaattgacggggacccgcacaagtagcggagcatgtggtttaattcgaagcaacgcgaagaaccttacctaagcttgacatccttttgaccgatgcctaatcgcatttttcccttcggggacagaagtgacgaaggcggcttgctggactgtagctcgtgtcgtgagatgttgggttaagtcccgcaacgagcgcaacccttgcctttagttgccagcattaagttgggcactctagagggactgccagggataacctggaggaaggtggggatgacgtcaaatcatcatgccccttatgcttagggctacacacgtgctacaatgggtggtacagagggcagccaagtcgtgaggccgagctaatcccttaaagccattctcagttcggattgtaggctgaaactcgcctacatgaagctggagttactagtaatcgcagatcaga

SEQ ID NO: 6 - DNA, 1373 bp, Artificial Sequence
  Clostridium_disporicum
  misc_feature (10)..(10): n is a, c, g, or t
  misc_feature (23)..(24): n is a, c, g, or t
gcgagtggangttcttcggagcnnaagctagcggcggacgggtgagtaacacgtgggcaacctgcctcatagaggggaatagcctcccgaaagggagattaataccgcataagattgtagcttcgcatgaagtagcaattaaaggagcaatccgctatgagatgggcccgcggcgcattagctagttggtgaggtaacggctcaccaaggcgacgatgcgtagccgacctgagagggtgatcggccacattgggactgagacacggcccagactcctacgggaggcagcagtggggaatattgcacaatgggggaaaccctgatgcagcaatgccgcgtgagtgatgacggccttcgggttgtaaagctctgtcttcggggacgataatgacggtacccgaggaggaagccacggctaactacgtgccagcagccgcggtaatacgtaggtggcaagcgttgtccggatttactgggcgtaaagggagcgtaggcggatttttaagtgagatgtgaaatacccgggcttaacttgggtgctgcatttcaaactggaagtctagagtgcaggagaggagaagggaattcctagtgtagcggtgaaatgcgtagagattaggaagaacaccagtggcgaaggcgcttctctggactgtaactgacgctgaggctcgaaagcgtggggagcaaacaggattagataccctggtagtccacgccgtaaacgatgaatactaggtgtaggggttgtcatgacctctgtgccgccgctaacgcattaagtattccgcctggggagtacggtcgcaagattaaaactcaaaggaattgacgggggcccgcacaagcagcggagcatgtggtttaattcgaagcaacgcgaagaatcttacctagacttgacgtctcctgaattacccgtaactggggaagtcgcttcggcgacaggaagacaggtggtgcatggttgtcgtcagctcgtgtcgtgagatgttgggttaagtcccgcaacgagcgcaacccttattgttagttgctaccatttagttgagcactctagcgagactgcccgggttaaccgggaggaaggtggggatgacgtcaaatcatcatgccccttatgtctagggctacacacgtgctacaatggcaagtacaaagagaagcaagaccgcgaggtggagcaaaactcaaaaacttgtctcagttcggattgtaggctgaaactcgcctacatgaagctggagttgctagtaatcgcgaatcagcatgtcgcggtgaatacgttcccgggccttgtacacaccgcccgtcacaccatgagagttggcaatacccaaagtgcgtgatctaactcgcaagagaggaagcgc

SEQ ID NO: 7 - DNA, 1357 bp, Artificial Sequence
  Clostridium_ghonii
cgaacccttcggggtgagcggcggacgggtgagtaacgcgtgggtaacctgccctgtacacacggataacataccgaaaggtatgctaatacgggataacatatgagagtcgcatggcttttgtatcaaagctccggcggtacaggatggacccgcgtctgattagctagttggtaaggtaacggcttaccaaggcaacgatcagtagccgacctgagagggtgatcggccacattggaactgagacacggtccaaactcctacgggaggcagcagtggggaatattgcacaatgggcgaaagcctgatgcagcaacgccgcgtgagcgatgaaggccttcgggtcgtaaagctctgtcctcaaggaagataatgacggtacttgaggaggaagccccggctaactacgtgccagcagccgcggtaatacgtagggggctagcgttatccggaattactgggcgtaaagggtgcgtaggcggtctttcaagccagaagtgaaaggctacggctcaaccgtagtaagcttttggaactgtaggacttgagtgcaggagaggagagtggaattcctagtgtagcggtgaaatgcgtagatattaggaggaacaccagtagcgaaggcggctctctggactgtaactgacgctgaggcacgaaagcgtggggagcaaacaggattagataccctggtagtccacgccgtaaacgatgagtactaggtgtcgggggttacccccctcggtgccgcagctaacgcattaagtactccgcctgggaagtacgctcgcaagagtgaaactcaaaggaattgacggggacccgcacaagtagcggatcatgtggtttaattcgaagcaacgcgaagaaccttacctaagcttgacatcccattgacctctccctattcggagatttcccttcggggaccttggggacaggtggggcatggaggtcgtcagctcgtgtcgtgagatgttgggttaagtcccgcaacgagcgcaacccttgcctttagttgccagcattaagttgggcactctagagggactgccgaggataactcggaggaaggtggggatgacgtcaaatcatcatgccccttatgcttagggctacacacgtgctacaatgggtggtacagagggttgccaagccgtgaggtggagctaatcccttaaagccattctcagttcggattgtaggctgaaactcgcctacatgaagctggagttactagtaatcgcagatcagaatgctgcggtgaatgcgttcccgggtcttgtacacaccgcccgtcacaccatgggagttgggggcgcccgaagccggttagctaaccttttaggaagcggcc

SEQ ID NO: 8 - DNA, 1360 bp, Artificial Sequence
  Ruminococcus_lactaris
  misc_feature (16)..(16): n is a, c, g, or t
gtcttcggatggaagngttggatacttagcggcggacgggtgagtaacgcgtgggcaacctgccccataccgggggataacagccagaaatggctgctaataccgcataagcgcacagcgcctcatggcgcggtgtgaaaaactccggtggtatgggatgggcccgcgtctgattaggtagttggcggggtaacggcccaccaagccgacgatcagtagccgacctgagagggtgaccggccacattgggactgagacacggcccaaactcctacgggaggcagcagtggggaatattgcacaatgggggaaaccctgatgcagcgacgccgcgtgagcgaagaagtatttcggtatgtaaagctctatcagcagggaagaaaaatgacggtacctgactaagaagccccggctaactacgtgccagcagccgcggtaatacgtagggggcaagcgttatccggatttactgggtgtaaagggagcgtagacggccaggcaagtctgatgtgaaaggcaggggctcaacccctggactgcattggaaactgtcaggctggagtgccggagaggtaagcggaattcctagtgtagcggtgaaatgcgtagatattaggaggaacaccagtggcgaaggcggcttactggacggtaactgacgttgatgctcgaaagcgtggggagcaaacaggattagataccctggtagtccacgccgtaaacgatgaatactaggtgtcggggggcaaagcccttcggtgccgccgcaaacgcattaagtattccacctggggagtacgttcgcaagaatgaaactcaaaggaattgacggggacccgcacaagcggtggagcatgtggtttaatttcgaagcaacgcgaagaaccttaccaagccttgacatcccattgaagccagagtaacgtctgacggccttcgggacaatggagacaggtggtgcatggttgtcgtcagctcgtgtcgtgagatgttgggttaagtcccgcaacgagcgcaacccttatcttcagtagccagcacgcgatggtgggcactctggagagactgccagggacaacctggaggaaggtggggatgacgtcaaatcatcatgccccttatggcttgggctacacacgtgctacaatggcgtaaacagagggaagcagccctgcgaaggtgagcgaatcccaaaaataacgtctcagttcggattgtagtctgcaactcgactacatgaagctggaatcgctagtaatcgcgaatcagaatgtcgcggtgaatacgttcccgggtcttgtacacaccgcccgtcacaccatgggagtcagtaacgcccgaagtcagtgacctaaccgaa

SEQ ID NO: 9 - DNA, 1377 bp, Artificial Sequence
  Lactonifactor_longoviformis
  misc_feature (438)..(438): n is a, c, g, or t
cataaggaacggattatttcggtaagaagtactttatgactgagtggcggacgggtgagtaacgcgtggataacctgcctcatacagggggataacagttagaaatgactgctaataccgcataagcgcacagtgctgcatggcacagtgtgaaaagctccggcggtatgagatggatccgcgtttgattagctagttggtggggtaaaggcctaccaaggcgacgatcaatagccgacctgagagggtgaccggccacattgggactgagacacggcccaaactcctacgggaggcagcagtggggaatattgcacaatgggggaaaccctgatgcagcgacgccgcgtgaaggaagaagtatttcggtatgtaaacttctatcagcagggaagaaaatgacggtacctgactaagaagccccggctaattacgtgnccagcagccgcggtaatacgtaaggggcaagcgttatccggatttactgggtgtaaagggagcgtagacggcagtgcaagtctgatgtgaaagcccggggctcaaccccgggactgcattggaaactgtgcagctagagtgtcggagaggtaagtggaattcctagtgtagcggtgaaatgcgtagatattaggaggaacaccagtggcgaaggcggcttactggacgataactgacgttgaggctcgaaagcgtggggagcaaacaggattagataccctggtagtccacgccgtaaacgatgaatactaggtgtcgggcgccaaaggcgttcggtgccgcagcaaacgcaataagtattccacctggggagtacgttcgcaagaatgaaactcaaaggaattgacggggacccgcacaagcggtggagcatgtggtttaattcgaagcaacgcgaagaaccttaccaagtcttgacatctgcctgaccggtccgtaacaggaccctttccttcgggacaggcaagacaggtggtgcatggttgtcgtcagctcgtgtcgtgagatgttgggttaagtcccgcaacgagcgcaacccttatccttagtagccagcaggtagagctgggcactctagggagactgccagggacaacctggaggaaggtggggatgacgtcaaatcatcatgccccttatgatttgggctacacacgtgctacaatggcgtaaacaaagggaggcgaaggggtgacctggagcaaatcccaaaaataacgtctcagttcggattgtagtctgcaactcgactacatgaagctggaatcgctagtaatcgcgaatcagaatgtcgcggtgaatacgttcccgggtcttgtacacaccgcccgtcacaccatgggagtcggatatgcccgaagccggtgaccgaacccgaaa

SEQ ID NO: 10 - DNA, 1370 bp, Artificial Sequence
  Eubacterium_sp_WAL_14571
  misc_feature (22)..(22): n is a, c, g, or t
gagcgagaagccattgactganacttcggtgagaaggatatggtggaaagcggcggacgggtgagtaacgcgtaggcaacctgccccttacagagggatagccattggaaacgatgattaaaacctcataacgcatcccccccacatggaggggatgccaaagattcatcggtaagggatgggcctgcgtctgattagcttgttggcggggtaacggcccaccaaggcgacgatcagtagccgacctgagagggtgatcggccacattggaactgagacacggtccaaactcctacgggaggcagcagtggggaatattgcacaatgggcgaaagcctgatgcagcaacgccgcgtgagggatgaaggccttcgggtcgtaaacctctgtccttggggaagaaacaaatgacggtacccatggaggaagccccggctaactacgtgccagcagccgcggtaatacgtagggggcgagcgttatccggaattattgggcgtaaagagtgcgtaggtggttacctaagcgcagggtctaaggcaatggctcaaccattgttcgccctgcgaactgggctacttgagtgcaggagaggaaagcggaattcctagtgtagcggtgaaatgcgtagatattaggaggaacaccagtggcgaaggcggctttctggactgttactgacactgaggcacgaaagcgtggggagcaaacaggattagataccctggtagtccacgccgtaaacgatgagcactaggtgtcggggccgcaaggcttcggtgccgcagttaacgcattaagtgctccgcctggggagtacgcacgcaagtgtgaaactcaaaggaattgacggggacccgcacaagcagcggagcatgtggtttaattcgaagcaacgcgaagaaccttaccaggacttgacatcccactgacagatccctaaccggatccttcttcggacagtggagacaggtggtgcatggttgtcgtcagctcgtgtcgtgagatgttgggttaagtcccgcaacgagcgcaacccttgccattagttgccatcattcagttgggcactctaatgggactgccggggacaactcggaggaaggtggggatgacgtcaaatcatcatgccccttatgttctgggctacacacgtgctacaatggccggtacagcaagaagcaaaaccgcgaggtggagcaaatctcaaaaaccggtcccagttcggactgcaggctgaaacccgcctgcacgaagccggagttgctagtaatcgtggatcagaatgccacggtgaatgcgttcccgggtcttgtacacaccgcccgtcacaccatggaagttgggggtgcccgaagccggcagggaaa

SEQ ID NO: 11 - DNA, 1374 bp, Artificial Sequence
  Lachnospiraceae_bacterium_3_1_57FAA
  misc_feature (908)..(908): n is a, c, g, or t
  misc_feature (914)..(916): n is a, c, g, or t
  misc_feature (918)..(920): n is a, c, g, or t
  misc_feature (933)..(936): n is a, c, g, or t
  misc_feature (939)..(939): n is a, c, g, or t
  misc_feature (958)..(958): n is a, c, g, or t
agttttcggatggaatcggtataacttagtggcggacgggtgagtaacgcgtgggaaacctgccctgtaccgggggataacacttagaaatgggtgctaataccgcataagcgcacggaaccgcatggttgtgtgtgaaaaactccggtggtacaggatggtcccgcgtctgattagccagttggcagggtaacggcctaccaaagcgacgatcagtagccggcctgagagggtgaacggccacattgggactgagacacggcccaaactcctacgggaggcagcagtggggaatattgcacaatgggggaaaccctgatgcagcgacgccgcgtgagtgaagaagtatttcggtatgtaaagctctatcagcagggaagaaaatgacggtacctgactaagaagccccggctaactacgtgccagcagccgcggtaatacgtagggggcaagcgttatccggatttactgggtgtaaagggagcgtagacggcatggcaagccagatgtgaaaacccagggctcaaccttgggattgcatttggaactgccaggctggagtgcaggagaggtaagcggaattcctagtgtagcggtgaaatgcgtagatattaggaggaacaccagtggcgaaggcggcttactggactgtaactgacgttgaggctcgaaagcgtggggagcaaacaggattagataccctggtagtccacgcggtaaacgatgattgctaggtgtaggtgggtatggacccatcggtgccgcagctaacgcaataagcaatccacctggggagtacgttcgcaagaatgaaactcaaaggaattgacggggacccgcacaagcggtggagcatgtggtttaattcgaagcaacgcgaagaaccttaccaagtcttgacatccccnctgacnnncnnnatatcttgtaaannnnganagggcttgcccttcgggancaagggagacaggtggtgcatggttgtcgtcagctcgtgtcgtgagatgttggggttaagtcccgcaacgagcgcaacccttattcttagtagccagcaggtaaagctgggcactctaaggagactgccggggataacccggaggaaggcggggatgacgtcaaatcatcatgccccttatgatttgggctacacacgtgctacaatggcgtaaacaaagggaagcgagacagtgatgtggagcaaatcccagaaataacgtctcagttcggattgtagtctgcaactcgactacatgaagctggaatcgctagtaatcgcgaatcagcatgtcgcggtgaatacgttcccgggtcttgtacacaccgcccgtcacaccatgggagttggaaatgcccgaagtctgtgacctaacc

SEQ ID NO: 12 - DNA, 1365 bp, Artificial Sequence
  Blautia_producta
  misc_feature (913)..(913): n is a, c, g, or t
ttcttcggattgaagtttttgtgactgagcggcggacgggtgagtaacgcgtgggtaacctgcctcatacagggggataacagttagaaatggctgctaataccgcataagcgcacaggaccgcatggtctggtgtgaaaaactccggtggtatgagatggacccgcgtctgattagctagttggaggggtaacggcccaccaaggcgacgatcagtagccggcctgagagggtgaacggccacattgggactgagacacggcccagactcctacgggaggcagcagtggggaatattgcacaatgggggaaaccctgatgcagcgacgccgcgtgaaggaagaagtatctcggtatgtaaacttctatcagcagggaagaaaatgacggtacctgactaagaagccccggctaactacgtgccagcagccgcggtaatacgtagggggcaagcgttatccggatttactgggtgtaaagggagcgtagacggaagagcaagtctgatgtgaaaggctggggcttaaccccaggactgcattggaaactgtttttctagagtgccggagaggtaagcggaattcctagtgtagcggtgaaatgcgtagatattaggaggaacaccagtggcgaaggcggcttactggacggtaactgacgttgaggctcgaaagcgtggggagcaaacaggattagataccctggtagtccacgccgtaaacgatgaatactaggtgtcgggtggcaaagccattcggtgccgcagcaaacgcaataagtattccacctggggagtacgttcgcaagaatgaaactcaaaggaattgacggggacccgcacaagcggtggagcatgtggtttaattcgaagcaacgcgaagaaccttaccaagtcttgacatccctctgaccnggcccgtaacggggccttcccttcggggcagaggagacaggtggtgcatggttgtcgtcagctcgtgtcgtgagatgttgggttaagtcccgcaacgagcgcaacccctatccttagtagccagcaggtgaagctgggcactctagggagactgccggggataacccggaggaaggcggggacgacgtcaaatcatcatgccccttatgatttgggctacacacgtgctacaatggcgtaaacaaagggaagcgagacagcgatgttgagcaaatcccaaaaataacgtcccagttcggactgcagtctgcaactcgactgcacgaagctggaatcgctagtaatcgcgaatcagaatgtcgcggtgaatacgttcccgggtcttgtacacaccgcccgtcacaccatgggagtcagtaacgcccgaagtcagtgacccaaccttataggag

SEQ ID NO: 13 - DNA, 1338 bp, Artificial Sequence
  Lachnospiraceae_bacterium_oral_taxon_F15
  misc_feature (917)..(917): n is a, c, g, or t
cttgctccatgaagttagtggcggacgggtgagtaacgcgtgggtaacctgccctatgcagggggataacgtttggaaacgaacgctaataccgcataacctagttggttcgcatgaaccgactagcaaagattttatcggcataggatggacccgcgttggattagctagttggtgagataacagcccaccaaggcaacgatccatagccggcctgagagggtgaacggccacactgggactgagacacggcccagactcctacgggaggcagcagtggggaatattgcacaatgggcgcaagcctgatgcagcgacgccgcgtgaaggatgaaggtcttcggatcgtaaacttctatcagcagggaagaaaccatgacggtacctgactaagaagccccggctaactacgtgccagcagccgcggtaatacgtagggggcaagcgttatccggaattactgggtgtaaagggtgcgtaggcggcgatttaagtcagatgtgaaaactcagggctcaaccttgagactgcatctgaaactgagttgctagagtgcaggagaggaaagcggaattccgagtgtagcggtgaaatgcgtagagattcggaggaacaccagtagcgaaggcggctttctggactgtaactgacgctgaggcacgaaagcgtggggagcgaacaggattagataccctggtagtccacgccgtaaacgatgaatactaggtgtcggggcttacgggtctcggtgccgcagctaacgcattaagtattccacctgggaagtacgaccgcaaggttgaaactcaaaggaattgacggggacccgcacaagcggtggagcatgtggtttaattcgaagcaacgcgaagaaccttacctaaacttgacatcccttttgaccggacggtaatgcnttcttcactagcttgctagtgcaaaagtgacaggtggtgcatggttgtcgtcagctcgtgtcgtgagatgttgggttaagtcccgcaacgagcgcaacccctatctttagtagccatcattcagttgggcactctagagagactgccagggataacctggaggaaggtggggatgacgtcaaatcatcatgccccttatgtttagggctacacacgtgctacaatgggtgctacaaagggaagcaaatccgcgaggccgagcaaatctcaaaaaagcactcccagttcggattgtagtctgcaactcgactacatgaagttggaatcgctagtaatcgcgaatcagaatgtcgcggtgaatacgttcccgggtcttgtacacaccgcccgtcacaccatgggagttgggggggcccaacgc

SEQ ID NO: 14 - DNA, 1338 bp, Artificial Sequence
  Clostridium_lactatifermentans
  misc_feature (897)..(897): n is a, c, g, or t
  misc_feature (917)..(917): n is a, c, g, or t
cttgctccatgaagttagtggcggacgggtgagtaacgcgtgggtaacctgccctatgcagggggataacgtttggaaacgaacgctaataccgcataacctagttggttcgcatgaaccgactagcaaagattttatcggcataggatggacccgcgttggattagctagttggtgagataacagcccaccaaggcaacgatccatagccggcctgagagggtgaacggccacactgggactgagacacggcccagactcctacgggaggcagcagtggggaatattgcacaatgggcgcaagcctgatgcagcgacgccgcgtgaaggatgaaggtcttcggatcgtaaacttctatcagcagggaagaaaccatgacggtacctgactaagaagccccggctaactacgtgccagcagccgcggtaatacgtagggggcaagcgttatccggaattactgggtgtaaagggtgcgtaggcggcgatttaagtcagatgtgaaaactcagggctcaaccttgagactgcatctgaaactgagttgctagagtgcaggagaggaaagcggaattccgagtgtagcggtgaaatgcgtagagattcggaggaacaccagtagcgaaggcggctttctggactgtaactgacgctgaggcacgaaagcgtggggagcgaacaggattagataccctggtagtccacgccgtaaacgatgaatactaggtgtcggggcttacgggtctcggtgccgcagctaacgcattaagtattccacctgggaagtacgaccgcaaggttgaaactcaaaggaattgacggggacccgcacaagcggtggagcatgtggtttaattcgaagcaacgcgaagaaccttacctaaacttgacatcctntttgaccggacggtaatgcnttcttcactagcttgctagtgcaaaagtgacaggtggtgcatggttgtcgtcagctcgtgtcgtgagatgttgggttaagtcccgcaacgagcgcaacccctatctttagtagccatcattcagttgggcactctagagagactgccagggataacctggaggaaggtggggatgacgtcaaatcatcatgccccttatgtttagggctacacacgtgctacaatgggtgctacaaagggaagcaaatccgcgaggccgagcaaatctcaaaaaagcactcccagttcggattgtagtctgcaactcgactacatgaagttggaatcgctagtaatcgcgaatcagaatgtcgcggtgaatacgttcccgggtcttgtacacaccgcccgtcacaccatgggagttgggggggcccaacgc

SEQ ID NO: 15 - DNA, 1305 bp, Artificial Sequence
  Clostridium_SC174.GCA_900066055.CNDBEJEM_03146 16S ribosomal RNA
tccggtggtatgagatggacccgcgtctgattagctagttggtgaggtaacggcccaccaaggcgacgatcagtagccgacctgagagggtgaccggccacattgggactgagacacggcccagactcctacgggaggcagcagtgggggatattgcacaatggaggaaactctgatgcagcgacgccgcgtgagtgaagaagtatttcggtatgtaaagctctatcagcagggaagaaaatgacggtacctgactaagaagccccggctaactacgtgccagcagccgcggtaatacgtagggggcaagcgttatccggatttactgggtgtaaagggagcgtagacggcgacgcaagtctgaagtgaaatacccgggctcaacctgggaactgctttggaaactgtgttgctagagtgctggagaggtaagcggaattcctagtgtagcggtgaaatgcgtagatattaggaagaacaccagtggcgaaggcggcttactggacagtaactgacgttgaggctcgaaagcgtggggagcaaacaggattagataccctggtagtccacgccgtaaacgatgaatactaggtgttggtgagcaaagctcatcggtgccgccgcaaacgcaataagtattccacctggggagtacgttcgcaagaatgaaactcaaaggaattgacggggacccgcacaagcggtggagcatgtggtttaattcgaagcaacgcgaagaaccttaccaaatcttgacatccctctgaaaagcctttaatcgggctcctccttcgggacagaggtgacaggtggtgcatggttgtcgtcagctcgtgtcgtgagatgttgggttaagtcccgcaacgagcgcaacccctattgtcagtagccagcaggtaaagctgggcactctgatgagactgccagggataacctggaggaaggtggggatgacgtcaaatcatcatgccccttatgatttgggctacacacgtgctacaatggcgtaaacaaagagaagcgagcctgcgagggggagcaaatctcaaaaataacgtctcagttcggattgtagtctgcaactcgactacatgaagctggaatcgctagtaatcgcagatcagaatgctgcggtgaatacgttcccgggtcttgtacacaccgcccgtcacaccatgggagtcggaaatgcccgaagccagtgacccaagcgaaagcagggagctgtcgaaggcaggtctgataactggggtgaagtcgtaacaaggtagccgtatcggaaggtgcggctggatcacctccttt

SEQ ID NO: 16 - DNA, 1509 bp, Artificial Sequence
  Akkermansia_muciniphila.GCF_000020225.FDANIDBG_00277 16S ribosomal RNA
atggagagtttgattctggctcagaacgaacgctggcggcgtggataagacatgcaagtcgaacgagagaattgctagcttgctaataattctctagtggcgcacgggtgagtaacacgtgagtaacctgcccccgagagcgggatagccctgggaaactgggattaataccgcatagtatcgaaagattaaagcagcaatgcgcttggggatgggctcgcggcctattagttagttggtgaggtaacggctcaccaaggcgatgacgggtagccggtctgagaggatgtccggccacactggaactgagacacggtccagacacctacgggtggcagcagtcgagaatcattcacaatgggggaaaccctgatggtgcgacgccgcgtgggggaatgaaggtcttcggattgtaaacccctgtcatgtgggagcaaattaaaaagatagtaccacaagaggaagagacggctaactctgtgccagcagccgcggtaatacagaggtctcaagcgttgttcggaatcactgggcgtaaagcgtgcgtaggctgtttcgtaagtcgtgtgtgaaaggcgcgggctcaacccgcggacggcacatgatactgcgagactagagtaatggagggggaaccggaattctcggtgtagcagtgaaatgcgtagatatcgagaggaacactcgtggcgaaggcgggttcctggacattaactgacgctgaggcacgaaggccaggggagcgaaagggattagatacccctgtagtcctggcagtaaacggtgcacgcttggtgtgcggggaatcgaccccctgcgtgccggagctaacgcgttaagcgtgccgcctggggagtacggtcgcaagattaaaactcaaagaaattgacggggacccgcacaagcggtggagtatgtggcttaattcgatgcaacgcgaagaaccttacctgggcttgacatgtaatgaacaacatgtgaaagcatgcgactcttcggaggcgttacacaggtgctgcatggccgtcgtcagctcgtgtcgtgagatgtttggttaagtccagcaacgagcgcaacccctgttgccagttaccagcacgtgaaggtggggactctggcgagactgcccagatcaactgggaggaaggtggggacgacgtcaggtcagtatggcccttatgcccagggctgcacacgtactacaatgcccagtacagagggggccgaagccgcgaggcggaggaaatcctaaaaactgggcccagttcggactgtaggctgcaacccgcctacacgaagccggaatcgctagtaatggcgcatcagctacggcgccgtgaatacgttcccgggtcttgtacacaccgcccgtcacatcatggaagccggtcgcacccgaagtatctgaagccaaccgcaaggaggcagggtcctaaggtgagactggtaactgggatgaagtcgtaacaaggtagccgtaggggaacctgcggctggatcacctccttt

SEQ ID NO: 17 - DNA, 1509 bp, Artificial Sequence; identical to SEQ ID NO: 16
  Akkermansia_muciniphila.GCF_000020225.FDANIDBG_00864 16S ribosomal RNA

SEQ ID NO: 18 - DNA, 1509 bp, Artificial Sequence; identical to SEQ ID NO: 16
  Akkermansia_muciniphila.GCF_000020225.FDANIDBG_01254 16S ribosomal RNA

SEQ ID NO: 19 - DNA, 1244 bp, Artificial Sequence
  Bacteroides_ovatus.GCF_000273195.POLEICMM_00001 16S ribosomal RNA (partial)
cgatggataggggttctgagaggaaggtcccccacattggaactgagacacggtccaaactcctacgggaggcagcagtgaggaatattggtcaatgggcgagagcctgaaccagccaagtagcgtgaaggatgaaggctctatgggtcgtaaacttcttttatatgggaataaagttttccacgtgtggaattttgtatgtaccatatgaataaggatcggctaactccgtgccagcagccgcggtaatacggaggatccgagcgttatccggatttattgggtttaaagggagcgtaggtggattgttaagtcagttgtgaaagtttgcggctcaaccgtaaaattgcagttgaaactggcagtcttgagtacagtagaggtgggcggaattcgtggtgtagcggtgaaatgcttagatatcacgaagaactccgattgcgaaggcagctcactagactgtcactgacactgatgctcgaaagtgtgggtatcaaacaggattagataccctggtagtccacacagtaaacgatgaatactcgctgtttgcgatatacagtaagcggccaagcgaaagcattaagtattccacctggggagtacgccggcaacggtgaaactcaaaggaattgacgggggcccgcacaagcggaggaacatgtggtttaattcgatgatacgcgaggaaccttacccgggcttaaattgcaacagaatatattggaaacagtatagccgtaaggctgttgtgaaggtgctgcatggttgtcgtcagctcgtgccgtgaggtgtcggcttaagtgccataacgagcgcaacccttatctttagttactaacaggtcatgctgaggactctagagagactgccgtcgtaagatgtgaggaaggtggggatgacgtcaaatcagcacggccccttacgtccggggctacacacgtgttacaatggggggtacagaaggcggctacctggtgacaggatgctaatcccaaaaacctctctcagttcggatcgaagtctgcaacccgacttcgtgaagctggattcgctagtaatcgcgcatcagccatggcgcggtgaatacgttcccgggccttgtacacaccgcccgtcaagccatgaaagccgggggtacctgaagtacgtaaccgcaaggagcgtcctagggtaaaactggtaattggggctaagtcgtaacaaggtagccgtaccggaaggtgcggctggaacacctcctt

SEQ ID NO: 20 - DNA, 1526 bp, Artificial Sequence
  Bacteroides_ovatus.GCF_000273195.POLEICMM_03664 16S ribosomal RNA
atgaagagtttgatcctggctcaggatgaacgctagctacaggcttaacacatgcaagtcgaggggcagcattttagtttgcttgcaaactgaagatggcgaccggcgcacgggtgagtaacacgtatccaacctgccgataactccggaatagcctttcgaaagaaagattaataccggatagcatacgaatatcgcatgatatttttattaaagaatttcggttatcgatggggatgcgttccattagtttgttggcggggtaacggcccaccaagactacgatggataggggttctgagaggaaggtcccccacattggaactgagacacggtccaaactcctacgggaggcagcagtgaggaatattggtcaatgggcgagagcctgaaccagccaagtagcgtgaaggatgaaggctctatgggtcgtaaacttcttttatatgggaataaagttttccacgtgtggaattttgtatgtaccatatgaataaggatcggctaactccgtgccagcagccgcggtaatacggaggatccgagcgttatccggatttattgggtttaaagggagcgtaggtggattgttaagtcagttgtgaaagtttgcggctcaaccgtaaaattgcagttgaaactggcagtcttgagtacagtagaggtgggcggaattcgtggtgtagcggtgaaatgcttagatatcacgaagaactccgattgcgaaggcagctcactagactgtcactgacactgatgctcgaaagtgtgggtatcaaacaggattagataccctggtagtccacacagtaaacgatgaatactcgctgtttgcgatatacagtaagcggccaagcgaaagcattaagtattccacctggggagtacgccggcaacggtgaaactcaaaggaattgacgggggcccgcacaagcggaggaacatgtggtttaattcgatgatacgcgaggaaccttacccgggcttaaattgcaacagaatatattggaaacagtatagccgtaaggctgttgtgaaggtgctgcatggttgtcgtcagctcgtgccgtgaggtgtcggcttaagtgccataacgagcgcaacccttatctttagttactaacaggttatgctgaggactctagagagactgccgtcgtaagatgtgaggaaggtggggatgacgtcaaatcagcacggccccttacgtccggggctacacacgtgttacaatggggggtacagaaggcggctacctggtgacaggatgctaatcccaaaaacctctctcagttcggatcgaagtctgcaacccgacttcgtgaagctggattcgctagtaatcgcgcatcagccatggcgcggtgaatacgttcccgggccttgtacacaccgcccgtcaagccatgaaagccgggggtacctgaagtacgtaaccgcaaggagcgtcctagggtaaaactggtaattggggctaagtcgtaacaaggtagccgtaccggaaggtgcggctggaacacctcctt

SEQ ID NO: 21 - DNA, 1525 bp, Artificial Sequence
  Bacteroides_ovatus.GCF_000273195.POLEICMM_06357 16S ribosomal RNA
atgaagagtttgatcctggctcaggatgaacgctagctacaggcttaacacatgcaagtcgaggggcagcattttagtttgcttgcaaactgaagatggcgaccggcgcacgggtgagtaacacgtatccaacctgccgataactccggaatagcctttcgaaagaaagattaataccggatagcatacgaatatcgcatgatatttttattaaagaatttcggttatcgatggggatgcgttccattagtttgttggcggggtaacggcccaccaagactacgatggataggggttctgagaggaaggtcccccacattggaactgagacacggtccaaactcctacgggaggcagcagtgaggaatattggtcaatgggcgagagcctgaaccagccaagtagcgtgaaggatgaaggctctatgggtcgtaaacttcttttatatgggaataaagttttccacgtgtggaattttgtatgtaccatatgaataaggatcggctaactccgtgccagcagccgcggtaatacggaggatccgagcgttatccggatttattgggtttaaagggagcgtaggtggattgttaagtcagttgtgaaagtttgcggctcaaccgtaaaattgcagttgaaactggcagtcttgagtacagtagaggtgggcggaattcgtggtgtagcggtgaaatgcttagatatcacgaagaactccgattgcgaaggcagctcactagactgtcactgacactgatgctcgaaagtgtgggtatcaaacaggattagataccctggtagtccacacagtaaacgatgaatactcgctgtttgcgatatacagtaagcggccaagcgaaagcattaagtattccacctggggagtacgccggcaacggtgaaactcaaaggaattgacgggggcccgcacaagcggaggaacatgtggtttaattcgatgatacgcgaggaaccttacccgggcttaaattgcaacagaatatattggaaacagtatagccgtaaggctgttgtgaaggtgctgcatggttgtcgtcagctcgtgccgtgaggtgtcggcttaagtgccataacgagcgcaacccttatctttagttactaacaggttatgctgaggactctagagagactgccgtcgtaagatgtgaggaaggtggggatgacgtcaaatcagcacggcccttacgtccggggctacacacgtgttacaatggggggtacagaaggcagctacacggcgacgtgatgctaatcccaaaaacctctctcagttcggatcgaagtctgcaacccgacttcgtgaagctggattcgctagtaatcgcgcatcagccatggcgcggtgaatacgttcccgggccttgtacacaccgcccgtcaagccatgaaagccgggggtacctgaagtacgtaaccgcaaggagcgtcctagggtaaaactggtaattggggctaagtcgtaacaaggtagccgtaccggaaggtgcggctggaacacctcctt

SEQ ID NO: 22 - DNA, 1525 bp, Artificial Sequence
  Bacteroides_ovatus.GCF_000273195.POLEICMM_06418 16S ribosomal RNA
atgaagagtttgatcctggctcaggatgaacgctagctacaggcttaacacatgcaagtcgaggggcagcattttagtttgcttgcaaactaaagatggcgaccggcgcacgggtgagtaacacgtatccaacctgccgataactcggggatagcctttcgaaagaaagattaatatccgatggtatattttctccgcatggtgagaatattaaagaatttcggttatcgatggggatgcgttccattagtttgttggcggggtaacggcccaccaagaccacgatggataggggttctgagaggaaggtcccccacattggaactgagacacggtccaaactcctacgggaggcagcagtgaggaatattggtcaatggacgagagtctgaaccagccaagtagcgtgaaggatgactgccctatgggttgtaaacttcttttatatgggaataaagtgttccacgtgtgggattttgtatgtaccatatgaataaggatcggctaactccgtgccagcagccgcggtaatacggaggatccgagcgttatccggatttattgggtttaaagggagcgtaggtggattgttaagtcagttgtgaaagtttgcggctcaaccgtaaaattgcagttgaaactggcagtcttgagtacagtagaggtgggcggaattcgtggtgtagcggtgaaatgcttagatatcacgaagaactccgattgcgaaggcagctcactagactgttactgacactgatgctcgaaagtgtgggtatcaaacaggattagataccctggtagtccacacagtaaacgatgaatactcgctgtttgcgatatacagtaagcggccaagcgaaagcattaagtattccacctggggagtacgccggcaacggtgaaactcaaaggaattgacgggggcccgcacaagcggaggaacatgtggtttaattcgatgatacgcgaggaaccttacccgggcttaaattgcaacagaatatattggaaacagtatagccgtaaggctgttgtgaaggtgctgcatggttgtcgtcagctcgtgccgtgaggtgtcggcttaagtgccataacgagcgcaacccttatctttagttactaacaggtcatgctgaggactctagagagactgccgtcgtaagatgtgaggaaggtggggatgacgtcaaatcagcacggcccttacgtccggggctacacacgtgttacaatggggggtacagaaggcggctacctggtgacaggatgctaatcccaaaaacctctctcagttcggatcgaagtctgcaacccgacttcgtgaagctggattcgctagtaatcgcgcatcagccatggcgcggtgaatacgttcccgggccttgtacacaccgcccgtcaagccatgaaagccgggggtacctgaagtacgtaaccgcaaggagcgtcctagggtaaaactggtaattggggctaagtcgtaacaaggtagccgtaccggaaggtgcggctggaacacctcctt

SEQ ID NO: 23 - DNA, 1051 bp, Artificial Sequence
  Bacteroides_vulgatus.GCF_000273295.HJEBCINN_01362 16S ribosomal RNA (partial)
tttgcatgtactttatgaataaggatcggctaactccgtgccagcagccgcggtaatacggaggatccgagcgttatccggatttattgggtttaaagggagcgtagatggatgtttaagtcagttgtgaaagtttgcggctcaaccgtaaaattgcagttgatactggatatcttgagtgcagttgaggcaggcggaattcgtggtgtagcggtgaaatgcttagatatcacgaagaactccgattgcgaaggcagcctgctaagctgcaactgacattgaggctcgaaagtgtgggtatcaaacaggattagataccctggtagtccacacggtaaacgatgaatactcgctgtttgcgatatacggcaagcggccaagcgaaagcgttaagtattccacctggggagtacgccggcaacggtgaaactcaaaggaattgacgggggcccgcacaagcggaggaacatgtggtttaattcgatgatacgcgaggaaccttacccgggcttaaattgcagatgaattacggtgaaagccgtaagccgcaaggcatctgtgaaggtgctgcatggttgtcgtcagctcgtgccgtgaggtgtcggcttaagtgccataacgagcgcaacccttgttgtcagttactaacaggttctgctgaggactctgacaagactgccatcgtaagatgtgaggaaggtggggatgacgtcaaatcagcacggcccttacgtccggggctacacacgtgttacaatggggggtacagagggccgctaccacgcgagtggatgccaatcccaaaaacctctctcagttcggactggagtctgcaacccgactccacgaagctggattcgctagtaatcgcgcatcagccacggcgcggtgaatacgttcccgggccttgtacacaccgcccgtcaagccatgggagccgggggtacctgaagtgcgtaaccgcgaggagcgccctagggtaaaactggtgactggggctaagtcgtaacaaggtagccgtaccggaaggtgcggctggaacacctccttt

SEQ ID NO: 24 - DNA, 1524 bp, Artificial Sequence
  Bacteroides_vulgatus.GCF_000273295.HJEBCINN_01365 16S ribosomal RNA
atgaagagtttgatcctggctcaggatgaacgctagctacaggcttaacacatgcaagtcgaggggcagcatggtcttagcttgctaaggccgatggcgaccggcgcacgggtgagtaacacgtatccaacctgccgtctactcttggacagccttctgaaaggaagattaatacaagatggcatcatgagttcacatgttcacatgattaaaggtattccggtagacgatggggatgcgttccattagatagtaggcggggtaacggcccacctagtcttcgatggataggggttctgagaggaaggtcccccacattggaactgagacacggtccaaactcctacgggaggcagcagtgaggaatattggtcaatgggcgagagcctgaaccagccaagtagcgtgaaggatgactgccctatgggttgtaaacttcttttataaaggaataaagtcgggtatggatacccgtttgcatgtactttatgaataaggatcggctaactccgtgccagcagccgcggtaatacggaggatccgagcgttatccggatttattgggtttaaagggagcgtagatggatgtttaagtcagttgtgaaagtttgcggctcaaccgtaaaattgcagttgatactggatatcttgagtgcagttgaggcaggcggaattcgtggtgtagcggtgaaatgcttagatatcacgaagaactccgattgcgaaggcagcctgctaagctgcaactgacattgaggctcgaaagtgtgggtatcaaacaggattagataccctggtagtccacacggtaaacgatgaatactcgctgtttgcgatatacggcaagcggccaagcgaaagcgttaagtattccacctggggagtacgccggcaacggtgaaactcaaaggaattgacgggggcccgcacaagcggaggaacatgtggtttaattcgatgatacgcgaggaaccttacccgggcttaaattgcagatgaattacggtgaaagccgtaagccgcaaggcatctgtgaaggtgctgcatggttgtcgtcagctcgtgccgtgaggtgtcggcttaagtgccataacgagcgcaacccttgttgtcagttactaacaggttctgctgaggactctgacaagactgccatcgtaagatgtgaggaaggtggggatgacgtcaaatcagcacggcccttacgtccggggctacacacgtgttacaatggggggtacagagggccgctaccacgcgagtggatgccaatcccaaaaacctctctcagttcggactggagtctgcaacccgactccacgaagctggattcgctagtaatcgcgcatcagccacggcgcggtgaatacgttcccgggccttgtacacaccgcccgtcaagccatgggagccgggggtacctgaagtgcgtaaccgcgaggagcgccctagggtaaaactggtgactggggctaagtcgtaacaaggtagccgtaccggaaggtgcggctggaacacctcctt

SEQ ID NO: 25 - DNA, 1524 bp, Artificial Sequence
  Bacteroides_vulgatus.GCF_000273295.HJEBCINN_02805 16S ribosomal RNA
atgaagagtttgatcctggctcaggatgaacgctagctacaggcttaacacatgcaagtcgaggggcagcatggtcttagcttgctaaggccgatggcgaccggcgcacgggtgagtaacacgtatccaacctgccgtctactcttggacagccttctgaaaggaagattaatacaagatggcatcatgagtccgcatgttcacatgattaaaggtattccggtaggcgatggggatgcgttccattagatagtaggcggggtaacggcccacctagtcttcgatggataggggttctgagaggaaggtcccccacattggaactgagacacggtccaaactcctacgggaggcagcagtgaggaatattggtcaatgggcgagagcctgaaccagccaagtagcgtgaaggatgactgccctatgggttgtaaacttcttttataaaggaataaagtcgggtatgtatacccgtttgcatgtactttatgaataaggatcggctaactccgtgccagcagccgcggtaatacggaggatccgagcgttatccggatttattgggtttaaagggagcgtagatggatgtttaagtcagttgtgaaagtttgcggctcaaccgtaaaattgcagttgatactggatatcttgagtgcagttgaggcaggcggaattcgtggtgtagcggtgaaatgcttagatatcacgaagaactccgattgcgaaggcagcctgctaagctgcaactgacattgaggctcgaaagtgtgggtatcaaacaggattagataccctggtagtccacacggtaaacgatgaatactcgctgtttgcgatatacagcaagcggccaagcgaaagcgttaagtattccacctggggagtacgccggcaacggtgaaactcaaaggaattgacgggggcccgcacaagcggaggaacatgtggtttaattcgatgatacgcgaggaaccttacccgggcttaaattgcagatgaattacggtgaaagccgtaagccgcaaggcatctgtgaaggtgctgcatggttgtcgtcagctcgtgccgtgaggtgtcggcttaagtgccataacgagcgcaacccttgttgtcagttactaacaggttctgctgaggactctgacaagactgccatcgtaagatgtgaggaaggtggggatgacgtcaaatcagcacggcccttacgtccggggctacacacgtgttacaatggggggtacagagggccgctaccacgcgagtggatgccaatcccaaaaacctctctcagttcggactggagtctgcaacccgactccacgaagctggattcgctagtaatcgcgcatcagccacggcgcggtgaatacgttcccgggccttgtacacaccgcccgtcaagccatgggagccgggggtacctgaagtgcgtaaccgcgaggagcgccctagggtaaaactggtgactggggctaagtcgtaacaaggtagccgtaccggaaggtgcggctggaacacctcctt

SEQ ID NO: 26 - DNA, 1524 bp, Artificial Sequence
  Bacteroides_vulgatus.GCF_000273295.HJEBCINN_03454 16S ribosomal RNA
atgaagagtttgatcctggctcaggatgaacgctagctacaggcttaacacatgcaagtcgaggggcagcatggtcttagcttgctaaggccgatggcgaccggcgcacgggtgagtaacacgtatccaacctgccgtctactcttggacagccttctgaaaggaagattaatacaagatggcatcatgagtccgcatgttcacatgattaaaggtattccggtagacgatggggatgcgttccattagatagtaggcggggtaacggcccacctagtcttcgatggataggggttctgagaggaaggtcccccacattggaactgagacacggtccaaactcctacgggaggcagcagtgaggaatattggtcaatgggcgcaggcctgaaccagccaagtagcgtgaaggatgactgccctatgggttgtaaacttcttttataaaggaataaagtcgggtatgcatacccgtttgcatgtactttatgaataaggatcggctaactccgtgccagcagccgcggtaatacggaggatccgagcgttatccggatttattgggtttaaagggagcgtagatggatgtttaagtcagttgtgaaagtttgcggctcaaccgtaaaattgcagttgatactggatatcttgagtgcagttgaggcaggcggaattcgtggtgtagcggtgaaatgcttagatatcacgaagaactccgattgcgaaggcagcctgctaagctgcaactgacattgaggctcgaaagtgtgggtatcaaacaggattagataccctggtagtccacacggtaaacgatgaatactcgctgtttgcgatatacagcaagcggccaagcgaaagcgttaagtattccacctggggagtacgccggcaacggtgaaactcaaaggaattgacgggggcccgcacaagcggaggaacatgtggtttaattcgatgatacgcgaggaaccttacccgggcttaaattgcagatgaattacggtgaaagccgtaagccgcaaggcatctgtgaaggtgctgcatggttgtcgtcagctcgtgccgtgaggtgtcggcttaagtgccataacgagcgcaacccttgttgtcagttactaacaggttccgctgaggactctgacaagactgccatcgtaagatgtgaggaaggtggggatgacgtcaaatcagcacggcccttacgtccggggctacacacgtgttacaatggggggtacagagggtcgctaccacgcgagtggatgccaatccccaaaacctctctcagttcggactggagtctgcaacccgactccacgaagctggattcgctagtaatcgcgcatcagccacggcgcggtgaatacgttcccgggccttgtacacaccgcccgtcaagccatgggagccgggggtacctgaagtgcgtaaccgcgaggagcgccctagggtaaaactggtgactggggctaagtcgtaacaaggtagccgtaccggaaggtgcggctggaacacctcctt

SEQ ID NO: 27 - DNA, 1524 bp, Artificial Sequence
  Bacteroides_vulgatus.GCF_000273295.HJEBCINN_03696 16S ribosomal RNA
atgaagagtttgatcctggctcaggatgaacgctagctacaggcttaacacatgcaagtcgaggggcagcatggtcttagcttgctaaggccgatggcgaccggcgcacgggtgagtaacacgtatccaacctgccgtctactcttggacagccttctgaaaggaagattaatacaagatggcatcatgagtccgcatgttcacatgattaaaggtattccggtagacgatggggatgcgttccattagatagtaggcggggtaacggcccacctagtcttcgatggataggggttctgagaggaaggtcccccacattggaactgagacacggtccaaactcctacgggaggcagcagtgaggaatattggtcaatgggcgagagcctgaaccagccaagtagcgtgaaggatgactgccctatgggttgtaaacttcttttataaaggaataaagtcgggtatggatacccgtttgcatgtactttatgaataaggatcggctaactccgtgccagcagccgcggtaatacggaggatccgagcgttatccggatttattgggtttaaagggagcgtagatggatgtttaagtcagttgtgaaagtttgcggctcaaccgtaaaattgcagttgatactggatatcttgagtgcagttgaggcaggcggaattcgtggtgtagcggtgaaatgcttagatatcacgaagaactccgattgcgaaggcagcctgctaagctgcaactgacattgaggctcgaaagtgtgggtatcaaacaggattagataccctggtagtccacacggtaaacgatgaatactcgctgtttgcgatatacagcaagcggccaagcgaaagcgttaagtattccacctggggagtacgccggcaacggtgaaactcaaaggaattgacgggggcccgcacaagcggaggaacatgtggtttaattcgatgatacgcgaggaaccttacccgggcttaaattgcagatgaattacggtgaaagccgtaagccgcaaggcatctgtgaaggtgctgcatggttgtcgtcagctcgtgccgtgaggtgtcggcttaagtgccataacgagcgcaacccttgttgtcagttactaacaggttctgctgaggactctgacaagactgccatcgtaagatgtgaggaaggtggggatgacgtcaaatcagcacggcccttacgtccggggctacacacgtgttacaatggggggtacagagggccgctaccacgcgagtggatgccaatcccaaaaacctctctcagttcggactggagtctgcaacccgactccacgaagctggattcgctagtaatcgcgcatcagccacggcgcggtgaatacgttcccgggccttgtacacaccgcccgtcaagccatgggagccgggggtacctgaagtgcgtaaccgcgaggagcgccctagggtaaaactggtgactggggctaagtcgtaacaaggtagccgtaccggaaggtgcggctggaacacctcctt

SEQ ID NO: 28 - DNA, 1054 bp, Artificial Sequence
  Bacteroides_vulgatus.GCF_000273295.HJEBCINN_04056 16S ribosomal RNA (partial)
ccgtttgcatgtactttatgaataaggatcggctaactccgtgccagcagccgcggtaatacggaggatccgagcgttatccggatttattgggtttaaagggagcgtagatggatgtttaagtcagttgtgaaagtttgcggctcaaccgtaaaattgcagttgatactggatatcttgagtgcagttgaggcaggcggaattcgtggtgtagcggtgaaatgcttagatatcacgaagaactccgattgcgaaggcagcctgctaagctgcaactgacattgaggctcgaaagtgtgggtatcaaacaggattagataccctggtagtccacacggtaaacgatgaatactcgctgtttgcgatatacagcaagcggccaagcgaaagcgttaagtattccacctggggagtacgccggcaacggtgaaactcaaaggaattgacgggggcccgcacaagcggaggaacatgtggtttaattcgatgatacgcgaggaaccttacccgggcttaaattgcagatgaattacggtgaaagccgtaagccgcaaggcatctgtgaaggtgctgcatggttgtcgtcagctcgtgccgtgaggtgtcggcttaagtgccataacgagcgcaacccttgttgtcagttactaacaggttctgctgaggactctgacaagactgccatcgtaagatgtgaggaaggtggggatgacgtcaaatcagcacggcccttacgtccggggctacacacgtgttacaatggggggtacagagggccgctaccacgcgagtggatgccaatccccaaaacctctctcagttcggactggagtctgcaacccgactccacgaagctggattcgctagtaatcgcgcatcagccacggcgcggtgaatacgttcccgggccttgtacacaccgcccgtcaagccatgggagccgggggtacctgaagtgcgtaaccgcgaggagcgccctagggtaaaactggtgactggggctaagtcgtaacaaggtagccgtaccggaaggtgcggctggaacacctccttt

SEQ ID NO: 29 - DNA, 1523 bp, Artificial Sequence
  Bacteroides_vulgatus_SC203.GCA_900066655.JNKMEEPB_01845 16S ribosomal RNA
taaagagtttgatcctggctcaggacgaacgctggcggcgcgcttaacacatgcaagtcgaacggacacatccgacggaatagcttgctaggaagatggatgttgttagtggcggacgggtgagtaacacgtgagcaacctacctcagagtgggggacaacagttggaaacgactgctaataccgcataagatggcagggtcgcatggcctggtcataaaaggagcaattcgctctgagatgggctcgcgtctgattagctagttggtgaggtaacggctcaccaaggcaacgatcagtagccggactgagaggttgaacggccacattgggactgagacacggcccagactcctacgggaggcagcagtggggaatattgcacaatgggggaaaccctgatgcagcgacgccgcgtgagggaagacggttttcggattgtaaacctctgtcttgtgggacgatagtgacggtaccacaggaggaagccatggctaactacgtgccagcagccgcggtaatacgtagatggcgagcgttgtccggaattactgggtgtaaagggagtgtaggcgggctggtaagttgaatgtgaaaccttcgggctcaacccggagcgtgcgttcaaaactgctggtcttgagtgaagtagaggcaggcggaattcccggtgtagcggtggaatgcgtagatatcgggaggaacaccagtggcgaaggcggcctgctgggcttttactgacgctgaggctcgaaagcatgggtagcaaacaggattagataccctggtagtccatgccgtaaacgatgattactaggtgtggggggattgaccccctccgtgccggagttaacacaataagtaatccacctggggagtacgaccgcaaggttgaaactcaaaggaattgacgggggcccgcacaagcagtggagtatgtggtttaattcgaagcaacgcgaaaaaccttaccaggtcttgacatccatcgccaggctaagagattagctgttccctccggggacgatgagacaggtggtgcatggttgtcgtcagctcgtgtcgtgagatgttgggttaagtcccgcaacgagcgcaacccttactattagttgctacgcaagagcactctaatgggactgccgttgacaaaacggaggaaggtggggatgacgtcaaatcatcatgccccttatgacctgggctacacacgtactacaatggccgttaacagagagcagcgataccgcgaggtggagcgaatctagaaaaacggtctcagttcggattgcaggctgaaactcgcctgcatgaagtcggaattgctagtaatcgcggatcagcatgccgcggtgaatacgttcccgggccttgtacacaccgcccgtcacaccatgagagccggtaacacccgaagtcagtagcctaaccgcaaggagggcgctgccgaaggtggggctggtaattggggtgaagtcgtaacaaggtagccgtatcggaaggtgcggctggatcacctccttt

SEQ ID NO: 30 - DNA, 1524 bp, Artificial Sequence
  Bacteroides_vulgatus_SC203.GCA_900066655.JNKMEEPB_02609 16S ribosomal RNA
atgaagagtttgatcctggctcaggatgaacgctagctacaggcttaacacatgcaagtcgaggggcagcatggtcttagcttgctaaggccgatggcgaccggcgcacgggtgagtaacacgtatccaacctgccgtctactcttggacagccttctgaaaggaagattaatacaagatggcatcatgagtccgcatgttcacatgattaaaggtattccggtagacgatggggatgcgttccattagatagtaggcggggtaacggcccacctagtcttcgatggataggggttctgagaggaaggtcccccacattggaactgagacacggtccaaactcctacgggaggcagcagtgaggaatattggtcaatgggcgagagcctgaaccagccaagtagcgtgaaggatgactgccctatgggttgtaaacttcttttataaaggaataaagtcgggtatgtatacccgtttgcatgtactttatgaataaggatcggctaactccgtgccagcagccgcggtaatacggaggatccgagcgttatccggatttattgggtttaaagggagcgtagatggatgtttaagtcagttgtgaaagtttgcggctcaaccgtaaaattgcagttgatactggatatcttgagtgcagttgaggcaggcggaattcgtggtgtagcggtgaaatgcttagatatcacgaagaactccgattgcgaaggcagcctgctaagctgcaactgacattgaggctcgaaagtgtgggtatcaaacaggattagataccctggtagtccacacggtaaacgatgaatactcgctgtttgcgatatacggcaagcggccaagcgaaagcgttaagtattccacctggggagtacgccggcaacggtgaaactcaaaggaattgacgggggcccgcacaagcggaggaacatgtggtttaattcgatgatacgcgaggaaccttacccgggcttaaattgcagatgaattacggtgaaagccgtaagccgcaaggcatctgtgaaggtgctgcatggttgtcgtcagctcgtgccgtgaggtgtcggcttaagtgccataacgagcgcaacccttgttgtcagttactaacaggttttgctgaggactctgacaagactgccatcgtaagatgtgaggaaggtggggatgacgtcaaatcagcacggcccttacgtccggggctacacacgtgttacaatggggggtacagagggccgctaccacgcgagtggatgccaatccccaaaacctctctcagttcggactggagtctgcaacccgactccacgaagctggattcgctagtaatcgcgcatcagccacggcgcggtgaatacgttcccgggccttgtacacaccgcccgtcaagccatgggagccgggggtacctgaagtgcgtaaccgcgaggagcgccctagggtaaaactggtgactggggctaagtcgtaacaaggtagccgtaccggaaggtgcggctggaacacctcctt

SEQ ID NO: 31 - DNA, 1528 bp, Artificial Sequence
  Bifidobacterium_dentium.GCF_000146775.BPHFADFC_02149 16S ribosomal RNA
tatggagggttcgattctggctcaggatgaacgctggcggcgtgcttaacacatgcaagtcgaacgggatcccgggggttcgctcccgggtgagagtggcgaacgggtgagtaatgcgtgaccgacctgccccatacaccggaatagctcctggaaacgggtggtaatgccggatgctccggttggatgcatgtccttccgggaaagattccatcggtatgggatggggtcgcgtcctatcagcttgatggcggggtaacggcccaccatggcttcgacgggtagccggcctgagagggcgaccggccacattgggactgagatacggcccagactcctacgggaggcagcagtggggaatattgcacaatgggcgcaagcctgatgcagcgacgccgcgtgcgggatggaggccttcgggttgtaaaccgcttttgatcgggagcaagcccttcggggtgagtgtacctttcgaataagcaccggctaactacgtgccagcagccgcggtaatacgtagggtgcaagcgttatccggaattattgggcgtaaagggctcgtaggcggttcgtcgcgtccggtgtgaaagcccatcgcttaacggtgggtctgcgccgggtacgggcgggctggagtgcggtaggggagactggaattcccggtgtaacggtggaatgtgtagatatcgggaagaacaccaatggcgaaggcaggtctctgggccgtcactgacgctgaggagcgaaagcgtggggagcgaacaggattagataccctggtagtccacgccgtaaacggtggatgctggatgtggggcccgttccacgggttccgtgtcggagctaacgcgttaagcatcccgcctggggagtacggccgcaaggctaaaactcaaagaaattgacgggggcccgcacaagcggcggagcatgcggattaattcgatgcaacgcgaagaaccttacctgggcttgacatgttcccgacagccgtagagatatggcctcccttcggggcgggttcacaggtggtgcatggtcgtcgtcagctcgtgtcgtgagatgttgggttaagtcccgcaacgagcgcaaccctcgccctgtgttgccagcacgtcatggtgggaactcacgggggaccgccggggtcaactcggaggaaggtggggatgacgtcagatcatcatgccccttacgtccagggcttcacgcatgctacaatggccggtacagcgggatgcgacatggcgacatggagcggatccctgaaaaccggtctcagttcggattggagtctgcaacccgactccatgaaggcggagtcgctagtaatcgcggatcagcaacgccgcggtgaatgcgttcccgggccttgtacacaccgcccgtcaagtcatgaaagtgggcagcacccgaagccggtggcctaaccccttgcgggatggagccgtctaaggtgaggctcgtgattgggactaagtcgtaacaaggtagccgtaccggaaggtgcggctggatcacctccttt

SEQ ID NO: 32 - DNA, 1548 bp, Artificial Sequence
  Bilophila_sp_4_1_30.GCF_000224655.HINPIMKF_01376 16S ribosomal RNA
ctggagagtttgattctggctcagattgaacgctggcggcgtgcttaacacatgcaagtcgaacgtgaaagtccttcgggatgagtaaagtggcgcacgggtgagtaacgcgtggataatctacccttaagatggggataacggctggaaacggtcgctaataccgaatacgctcccgattttatcgttggggggaaagatggcctctgcttgcaagctatcgcttaaggatgagtccgcgtcccattagctagttggcggggtaacggcccaccaaggcaacgatgggtagccggtctgagaggatgaccggccacactggaactggaacacggtccagactcctacgggaggcagcagtggggaatattgcgcaatgggcgaaagcctgacgcagcgacgccgcgtgagggatgaaggttctcggatcgtaaacctctgtcaggggggaagaaaccccctcgtgtgaataatgcgagggcttgacggtacccccaaaggaagcaccggctaactccgtgccagcagccgcggtaatacggagggtgcaagcgttaatcggaatcactgggcgtaaagcgcacgtaggcggcttggtaagtcaggggtgaaatcccacagcccaactgtggaactgcctttgatactgccaggcttgagtaccggagagggtggcggaattccaggtgtaggagtgaaatccgtagatatctggaggaacaccggtggcgaaggcggccacctggacggtaactgacgctgaggtgcgaaagcgtgggtagcaaacaggattagataccctggtagtccacgctgtaaacgatgggtgctgggtgctgggatgtatgtctcggtgccgtagctaacgcgataagcaccccgcctggggagtacggtcgcaaggctgaaactcaaagaaattgacgggggcccgcacaagcggtggagtatgtggtttaattcgatgcaacgcgaagaaccttacccaggcttgacatctagggaacccttcggaaatgaaggggtgcccttcggggagccctaagacaggtgctgcatggctgtcgtcagctcgtgccgtgaggtgttgggttaagtcccgcaacgagcgcaacccctatcttcagttgccagcaggtaaggctgggcactctggagagaccgccccggtcaacggggaggaaggtggggacgacgtcaagtcatcatggcccttacgcctggggctacacacgtactacaatggcgcgcacaaagggtagcgagaccgcgaggtggagccaatcccaaaaaacgcgtcccagtccggattggagtctgcaactcgactccatgaagtcggaatcgctagtaattcgagatcagcatgctcgggtgaatgcgttcccgggccttgtacacaccgcccgtcacaccacgaaagtcggttttacccgaagccggtgagctaactcgcaagaggagcagccgtctacggtagggccgatgattggggtgaagtcgtaacaaggtagccgtaggggaacctgcggctggatcacctccttt

SEQ ID NO: 33 - DNA, 1548 bp, Artificial Sequence
  Bilophila_wadsworthia.GCF_000185705.BLECPLCK_00498 16S ribosomal RNA
ctggagagtttgattctggctcagattgaacgctggcggcgtgcttaacacatgcaagtcgaacgtgaaagtccttcggggcgagtaaagtggcgcacgggtgagtaacgcgtggataatctacccttaagatggggataacggctggaaacggtcgctaataccgaatacgctcccgattttatcattggggggaaagatggcctctgcttgcaagctatcgcttaaggatgagtccgcgtcccattagctagttggcggggtaacggcccaccaaggcgacgatgggtagccggtctgagaggatgaccggccacactggaactggaacacggtccagactcctacgggaggcagcagtggggaatattgcgcaatgggcgaaagcctgacgcagcgacgccgcgtgagggatgaaggttctcggatcgtaaacctctgtcaggggggaagaaaccccctcgtgtgaataatgcgagggcttgacggtacccccaaaggaagcaccggctaactccgtgccagcagccgcggtaatacggagggtgcaagcgttaatcggaatcactgggcgtaaagcgcacgtaggcggcttggtaagtcaggggtgaaatcccacagcccaactgtggaactgcctttgatactgccaggcttgagtaccggagagggtggcggaattccaggtgtaggagtgaaatccgtagatatctggaggaacaccggtggcgaaggcggccacctggacggtaactgacgctgaggtgcgaaagcgtgggtagcaaacaggattagataccctggtagtccacgctgtaaacgatgggtgctgggtgctgggatgtatgtctcggtgccgtagctaacgcgataagcaccccgcctggggagtacggtcgcaaggctgaaactcaaagaaattgacgggggcccgcacaagcggtggagtatgtggtttaattcgatgcaacgcgaagaaccttacccaggcttgacatctagggaacccttcggaaatgaaggggtgcccttcggggagccctaagacaggtgctgcatggctgtcgtcagctcgtgccgtgaggtgttgggttaagtcccgcaacgagcgcaacccctatcttcagttgccagcaggtaaggctgggcactctggagagaccgccccggtcaacggggaggaaggtggggacgacgtcaagtcatcatggcccttacgcctggggctacacacgtactacaatggcgcgcacaaagggtagcgagaccgcgaggtggagccaatcccaaaaaacgcgtcccagtccggattggagtctgcaactcgactccatgaagtcggaatcgctagtaattcgagatcagcatgctcgggtgaatgcgttcccgggccttgtacacaccgcccgtcacaccacgaaagtcggttttacccgaagccggtgagctaactcgcaagaggagcagccgtctacggtagggccgatgattggggtgaagtcgtaacaaggtagccgtaggggaacctgcggctggatcacctccttt

SEQ ID NO: 34 - DNA, 1548 bp, Artificial Sequence
  Bilophila_wadsworthia.GCF_000185705.BLECPLCK_01077 16S ribosomal RNA
ctggagagtttgattctggctcagattgaacgctggcggcgtgcttaacacatgcaagtcgaacgtgaaagtccttcggggcgagtaaagtggcgcacgggtgagtaacgcgtggataatctacccttaagatggggataacggctggaaacggtcgctaataccgaatacgctcccgattttatcgttggggggaaagatggcctctgcttgcaagctatcgcttaaggatgagtccgcgtcccattagctagttggcggggtaacggcccaccaaggcgacgatgggtagccggtctgagaggatgaccggccacactggaactggaacacggtccagactcctacgggaggcagcagtggggaatattgcgcaatgggcgaaagcctgacgcagcgacgccgcgtgagggatgaaggttctcggatcgtaaacctctgtcaggggggaagaaaccccctcgtgtgaataatgcgagggcttgacggtacccccaaaggaagcaccggctaactccgtgccagcagccgcggtaatacggagggtgcaagcgttaatcggaatcactgggcgtaaagcgcacgtaggcggcttggtaagtcaggggtgaaatcccacagcccaactgtggaactgcctttgatactgccaggcttgagtaccggagagggtggcggaattccaggtgtaggagtgaaatccgtagatatctggaggaacaccggtggcgaaggcggccacctggacggtaactgacgctgaggtgcgaaagcgtgggtagcaaacaggattagataccctggtagtccacgctgtaaacgatgggtgctgggtgctgggatgtatgtctcggtgccgtagctaacgcgataagcaccccgcctggggagtacggtcgcaaggctgaaactcaaagaaattgacgggggcccgcacaagcggtggagtatgtggtttaattcgatgcaacgcgaagaaccttacccaggcttgacatctagggaacccttcggaaatgaaggggtgcccttcggggagccctaagacaggtgctgcatggctgtcgtcagctcgtgccgtgaggtgttgggttaagtcccgcaacgagcgcaacccctatcttcagttgccagcaggtaaggctgggcactctggagagaccgccccggtcaacggggaggaaggtggggacgacgtcaagtcatcatggcccttacgcctggggctacacacgtactacaatggcgcgcacaaagggtagcgagaccgcgaggtggagccaatcccaaaaaacgcgtcccagtccggattggagtctgcaactcgactccatgaagtcggaatcgctagtaattcgagatcagcatgctcgggtgaatgcgttcccgggccttgtacacaccgcccgtcacaccacgaaagtcggttttacccgaagccggtgagctaactcgcaagaggagcagccgtctacggtagggccgatgattggggtgaagtcgtaacaaggtagccgtaggggaacctgcggctggatcacctccttt

SEQ ID NO: 35 - DNA, 1548 bp, Artificial Sequence; identical to SEQ ID NO: 33
  Bilophila_wadsworthia.GCF_000185705.BLECPLCK_01159 16S ribosomal RNA

SEQ ID NO: 36 - DNA, 1548 bp, Artificial Sequence; identical to SEQ ID NO: 34
  Bilophila_wadsworthia.GCF_000185705.BLECPLCK_02201 16S ribosomal RNA

SEQ ID NO: 37 - DNA, 1526 bp, Artificial Sequence
  Blautia_SC109.SPC10877.OHAPKBMM_03334 16S ribosomal RNA
atgagagtttgatcctggctcaggatgaacgctggcggcgtgcttaacacatgcaagtcgagcgaagcaatttaagtgaagttttcggatggatcttagattgactgagcggcggacgggtgagtaacgcgtggataacctgcctcacacagggggataacagttagaaatgactgctaataccgcataagcgcacggtaccgcatggtacagtgtgaaaaactccggtggtgtgagatggatccgcgtctgattaggtagttggtgaggtaacggcccaccaagccgacgatcagtagccgacctgagagggtgaccggccacattgggactgagacacggcccaaactcctacgggaggcagcagtggggaatattgcacaatgggcgaaagcctgatgcagcaacgccgcgtgagtgaagaagtatctcggtatgtaaagctctatcagcagggaagaaaatgacggtacctgactaagaagccccggctaactacgtgccagcagccgcggtaatacgtagggggcaagcgttatccggatttactgggtgtaaagggagcgcagacggcactgcaagtctgaagtgaaagcccggggctcaaccccgggactgctttggaaactgtagagctagagtgctggagaggcaagcggaattcctagtgtagcggtgaaatgcgtagatattaggaagaacaccagtggcgaaggcggcttgctggacagtaactgacgttcaggctcgaaagcgtggggagcaaacaggattagataccctggtagtccacgccgtaaacgatgaatactaggtgttggtgggcaaagcccatcggtgccgccgcaaacgcaataagtattccacctggggagtacgttcgcaagaatgaaactcaaaggaattgacggggacccgcacaagcggtggagcatgtggtttaattcgaagcaacgcgaagaaccttaccaagtcttgacatcgtgatgaccggaacttaaccgttccttcccttcggggcatcatagacaggtggtgcatggttgtcgtcagctcgtgtcgtgagatgttgggttaagtcccgcaacgagcgcaacccttatcctcagtagccagcagtaagatgggcactctggggagactgccagggataacctggaggaaggtggggatgacgtcaaatcatcatgccccttatgatttgggctacacacgtgctacaatggcgtaaacaaagggaagcaagagggtgacctggagcaaatcccaaaaataacgtcccagttcggactgtagtctgcaacccgactacacgaagctggaatcgctagtaatcgcagatcagaatgctgcggtgaatacgttcccgggtcttgtacacaccgcccgtcacaccatgggagtcagcaacgcccgaagtcagtgactcaaccgcaaggagagagctgccgaaggcggggcaggtaactggggtgaagtcgtaacaaggtagccgtatcggaaggtgcggctggatcacctccttt

SEQ ID NO: 38 - DNA, 1526 bp, Artificial Sequence
  Blautia_SC109.SPC10877.OHAPKBMM_03923 16S ribosomal RNA
atgagagtttgatcctggctcaggatgaacgctggcggcgtgcttaacacatgcaagtcgagcgaagcaatttaagtgaagttttcggatggatcttagattgactgagcggcggacgggtgagtaacgcgtggataacctgcctcacacagggggataacagttagaaatgactgctaataccgcataagcgcacggtaccgcatggtacagtgtgaaaaactccggtggtgtgagatggatccgcgtctgattaggtagttggtgaggtaacggcccaccaagccgacgatcagtagccgacctgagagggtgaccggccacattgggactgagacacggcccaaactcctacgggaggcagcagtggggaatattgcacaatgggcgaaagcctgatgcagcaacgccgcgtgagtgaagaagtatctcggtatgtaaagctctatcagcagggaagaaaatgacggtacctgactaagaagccccggctaactacgtgccagcagccgcggtaatacgtagggggcaagcgttatccggatttactgggtgtaaagggagcgcagacggcactgcaagtctgaagtgaaagcccggggctcaaccccgggactgctttggaaactgtagagctagagtgctggagaggcaagcggaattcctagtgtagcggtgaaatgcgtagatattaggaagaacaccagtggcgaaggcggcttgctggacagtaactgacgttcaggctcgaaagcgtggggagcaaacaggattagataccctggtagtccacgccgtaaacgatgaatactaggtgttggtgggcaaagcccatcggtgccgccgcaaacgcaataagtattccacctggggagtacgttcgcaagaatgaaactcaaaggaattgacggggacccgcacaagcggtggagcatgtggtttaattcgaagcaacgcgaagaaccttaccaagtcttgacatcgtgatgaccggaacttaaccgttccttcccttcggggcatcatagacaggtggtgcatggttgtcgtcagctcgtgtcgtgagatgttgggttaagtcccgcaacgagcgcaacccttatcctcagtagccagcagtaagatgggcactctgtggagactgccagggataacctggaggaaggtggggatgacgtcaaatcatcatgccccttatgatttgggctacacacgtgctacaatggcgtaaacaaagggaagcaagagggtgacctggagcaaatcccaaaaataacgtcccagttcggactgtagtctgcaacccgactacacgaagctggaatcgctagtaatcgcagatcagaatgctgcggtgaatacgttcccgggtcttgtacacaccgcccgtcacaccatgggagtcagcaacgcccgaagtcagtgactcaaccgcaaggagagagctgccgaaggcggggcaggtaactggggtgaagtcgtaacaaggtagccgtatcggaaggtgcggctggatcacctccttt

SEQ ID NO: 39 - DNA, 1531 bp, Artificial Sequence
  Clostridiaceae_bacterium_JC118.GCF_000313565.GNHMFION_03462 16S ribosomal RNA
atggagagtttgatcctggctcaggatgaacgctggcggcatgcctaatacatgcaagtcgaacgaagtgaagatagcttgctattggaacttagtggcgaacgggtgagtaacacgtagataacctgcctgtatgaccgggataacagttggaaacgactgctaataccggataggcagagaggaggcatctcttctctgttaaagttgggacacaacgcaaacagatggatctgcggtgcattagctagttggtgaggtaacggcccaccaaggcgatgatgcatagccggcctgagagggcgaacggccacattgggactgagacacggcccaaactcctacgggaggcagcagtagggaattttcggcaatgggggaaaccctgaccgagcaatgccgcgtgagtgaagacggccttcgggttgtaaagctctgttgtaagggaagaacggcatagagagggaatgctctatgagtgacggtaccttaccagaaagccacggctaactacgtgccagcagccgcggtaatacgtaggtggcaagcgttatccggaattattgggcgtaaagggtgcgtaggcggcgagataagtctgaggtaaaagcccgtggctcaaccacggtaagccttggaaactgtctggctggagtgcaggagaggacaatggaattccatgtgtagcggtaaaatgcgtagatatatggaggaacaccagtggcgaaggcggttgtctggcctgtaactgacgctgaagcacgaaagcgtggggagcaaataggattagataccctagtagtccacgccgtaaacgatgagaactaagtgttggggaaactcagtgctgcagttaacgcaataagttctccgcctggggagtatgcacgcaagtgtgaaactcaaaggaattgacgggggcccgcacaagcggtggagtatgtggtttaattcgacgcaacgcgaagaaccttaccaggccttgacatggtatcaaaggccctagagatagggagatagttatggtacacacaggtggtgcatggttgtcgtcagctcgtgtcgtgagatgttgggttaagtcccgcaacgagcgcaacccttgtttctagttaccaacagtaagatggggactctagagagactgccggtgacaaaccggaggaaggtggggatgacgtcaaatcatcatgccccttatggcctgggctacacacgtactacaatggcgtctacaaagagcagcgagcaggtgactgtgagcgaatctcataaaggacgtctcagttcggattgaagtctgcaactcgacttcatgaagtcggaatcgctagtaatcgcggatcagcatgccgcggtgaatacgttctcgggccttgtacacaccgcccgtcaaaccatgggagttgataatacccgaagccggtggcctaaccatttatggagggagccgtcgaaggtaggatcgatgactggggttaagtcgtaacaaggtatccctacgggaacgtggggatggatcacctccttt

SEQ ID NO: 40 - DNA, 1531 bp, Artificial Sequence
  Clostridium_aldenense_SC114.SPC11276.OLKKOKAM_04952 16S ribosomal RNA
tttgagagtttgatcctggctcaggatgaacgctggcggcgtgcctaacacatgcaagtcgaacgaagcgattaggatgaagttttcggatggattcctggttgactgagtggcggacgggtgagtaacgcgtggataacctgcctcacactgggggataacagttagaaatggctgctaataccgcataagcgcacagtaccgcatggtacggtgtgaaaaacccaggtggtgtgagatggatccgcgtctgattagccagttggcggggtaacggcccaccaaagcgacgatcagtagccgacctgagagggtgaccggccacattgggactgagacacggcccaaactcctacgggaggcagcagtggggaatattgcacaatgggcggaagcctgatgcagcgacgccgcgtgagtgaagaagtatctcggtatgtaaagctctatcagcagggaagaaaatgacggtacctgactaagaagccccggctaactacgtgccagcagccgcggtaatacgtagggggcaagcgttatccggatttactgggtgtaaagggagcgtagacggcgacgcaagtctggagtgaaagcccggggcccaaccccgggactgctttggaaactgtgctgctggagtgcaggagaggtaagtggaattcctagtgtagcggtgaaatgcgtagatattaggaggaacaccagtggcgaaggcggcttactggactgtaactgacgttgaggctcgaaagcgtggggagcaaacaggattagataccctggtagtccacgccgtaaacgatgaatgctaggtgtcggggggcaaagcccttcggtgccgccgctaacgcaataagcattccacctggggagtacgttcgcaagaatgaaactcaaaggaattgacggggacccgcacaagcggtggagcatgtggtttaattcgaagcaacgcgaagaaccttaccaagtcttgacatccccctgaccggcgcgtaacggtgcccttccttcgggacaggggagacaggtggtgcatggttgtcgtcagctcgtgtcgtgagatgttgggttaagtcccgcaacgagcgcaacccttatccttagtagccagcacgtcgtggtgggcactctagggagactgccagggataacctggaggaaggtggggatgacgtcaaatcatcatgccccttatgatttgggctacacacgtgctacaatggcgtaaacaaagggaggcgaccctgcgaaggtaagcaaatcccaaaaataacgtcccagttcggactgtagtctgcaacccgactacacgaagctggaatcgctagtaatcgcggatcagaatgccgcggtgaatacgttcccgggtcttgtacacaccgcccgtcacaccatgggagtcagcaacgcccgaagtcagtgacccaaccttaacaggagggagctgccgaaggcggggcaggtaactggggtgaagtcgtaacaaggtagccgtatcggaaggtgcggctggatcacctccttt

SEQ ID NO: 41 - DNA, 1528 bp, Artificial Sequence
  Clostridium_bolteae.GCF_000154365.IEEMCAGI_02026 16S ribosomal RNA
atgagagtttgatcctggctcaggatgaacgctggcggcgtgcctaacacatgcaagtcgaacgaagcaattgaaggaagttttcggatggaattcgattgactgagtggcggacgggtgagtaacgcgtggataacctgcctcacactgggggataacagttagaaatgactgctaataccgcataagcgcacagtaccgcatggtacagtgtgaaaaactccggtggtgtgagatggatccgcgtctgattagccagttggcggggtaacggcccaccaaagcgacgatcagtagccgacctgagagggtgaccggccacattgggactgagacacggcccaaactcctacgggaggcagcagtggggaatattgcacaatgggcgaaagcctgatgcagcgacgccgcgtgagtgaagaagtatttcggtatgtaaagctctatcagcagggaagaaaatgacggtacctgactaagaagccccggctaactacgtgccagcagccgcggtaatacgtagggggcaagcgttatccggatttactgggtgtaaagggagcgtagacggcgaagcaagtctgaagtgaaaacccagggctcaaccctgggactgctttggaaactgttttgctagagtgtcggagaggtaagtggaattcctagtgtagcggtgaaatgcgtagatattaggaggaacaccagtggcgaaggcggcttactggacgataactgacgttgaggctcgaaagcgtggggagcaaacaggattagataccctggtagtccacgccgtaaacgatgaatgctaggtgttggggggcaaagcccttcggtgccgtcgcaaacgcagtaagcattccacctggggagtacgttcgcaagaatgaaactcaaaggaattgacggggacccgcacaagcggtggagcatgtggtttaattcgaagcaacgcgaagaaccttaccaagtcttgacatcctcttgaccggcgtgtaacggcgccttcccttcggggcaagagagacaggtggtgcatggttgtcgtcagctcgtgtcgtgagatgttgggttaagtcccgcaacgagcgcaacccttatccttagtagccagcaggtaaagctgggcactctagggagactgccagggataacctggaggaaggtggggatgacgtcaaatcatcatgccccttatgatttgggctacacacgtgctacaatggcgtaaacaaagggaagcaagacagtgatgtggagcaaatcccaaaaataacgtcccagttcggactgtagtctgcaacccgactacacgaagctggaatcgctagtaatcgcgaatcagaatgtcgcggtgaatacgttcccgggtcttgtacacaccgcccgtcacaccatgggagtcagcaacgcccgaagtcagtgacccaactcgcaagagagggagctgccgaaggcggggcaggtaactggggtgaagtcgtaacaaggtagccgtatcggaaggtgcggctggatcacctccttt

SEQ ID NO: 42 - DNA, 1528 bp, Artificial Sequence
  Clostridium_hathewayi.GCF_000371445.MHGGNMMN_02421 16S ribosomal RNA
atgagagttcgatcctggctcaggatgaacgctggcggcgtgcttaacacatgcaagtcgagcgaagcggtttcaatgaagttttcggatggaattgaaattgacttagcggcggacgggtgagtaacgcgtgggtaacctgccttacactgggggataacagttagaaatgactgctaataccgcataagcgcacagggccgcatggtctggtgtgaaaaactccggtggtgtaagatggacccgcgtctgattaggtagttggtggggtaacggcccaccaagccgacgatcagtagccgacctgagagggtgaccggccacattgggactgagacacggcccaaactcctacgggaggcagcagtggggaatattggacaatgggcgaaagcctgatccagcgacgccgcgtgagtgaagaagtatttcggtatgtaaagctctatcagcagggaagaaaatgacggtacctgactaagaagccccggctaactacgtgccagcagccgcggtaatacgtagggggcaagcgttatccggatttactgggtgtaaagggagcgtagacggttaagcaagtctgaagtgaaagcccggggctcaaccccggtactgctttggaaactgtttgacttgagtgcaggagaggtaagtggaattcctagtgtagcggtgaaatgcgtagatattaggaggaacaccagtggcgaaggcggcttactggactgtaactgacgttgaggctcgaaagcgtggggagcaaacaggattagataccctggtagtccacgccgtaaacgatgaatactaggtgtcgggggacaacgtccttcggtgccgccgctaacgcaataagtattccacctggggagtacgttcgcaagaatgaaactcaaaggaattgacggggacccgcacaagcggtggagcatgtggtttaattcgaagcaacgcgaagaaccttaccaagtcttgacatcccattgaaaacactttaaccggtgtccctcttcggagcaatggagacaggtggtgcatggttgtcgtcagctcgtgtcgtgagatgttgggttaagtcccgcaacgagcgcaacccttatccttagtagccagcacatgatggtgggcactctggggagactgccagggataacctggaggaaggtggggatgacgtcaaatcatcatgccccttatgatttgggctacacacgtgctacaatggcgtaaacaaagggaagcaaaggagcgatctggagcaaaccccaaaaataacgtctcagttcggattgcaggctgcaactcgcctgcatgaagctggaatcgctagtaatcgcgaatcagaatgtcgcggtgaatacgttcccgggtcttgtacacaccgcccgtcacaccatgggagttggtaacgcccgaagtcagtgacccaaccgcaaggagggagctgccgaaggcgggactgataactggggtgaagtcgtaacaaggtagccgtatcggaaggtgcggctggatcacctccttt

SEQ ID NO: 43 - DNA, 927 bp, Artificial Sequence
  Clostridium_hathewayi.GCF_000371445.MHGGNMMN_05914 16S ribosomal RNA (partial)
atgagagttcgatcctggctcaggatgaacgctggcggcgtgcttaacacatgcaagtcgagcgaagcggtttcaatgaagttttcggatggatttgaaattgacttagcggcggacgggtgagtaacgcgtgggtaacctgccttacactgggggataacagttagaaatgactgctaataccgcataagcgcacagggccgcatggtctggtgtgaaaaactccggtggtgtaagatggacccgcgtctgattaggtagttggtggggtaacggcccaccaagccgacgatcagtagccgacctgagagggtgaccggccacattgggactgagacacggcccaaactcctacgggaggcagcagtggggaatattggacaatgggcgaaagcctgatccagcgacgccgcgtgagtgaagaagtatttcggtatgtaaagctctatcagcagggaagaaaatgacggtacctgactaagaagccccggctaactacgtgccagcagccgcggtaatacgtagggggcaagcgttatccggatttactgggtgtaaagggagcgtagacggttaagcaagtctgaagtgaaagcccggggctcaaccccggtactgctttggaaactgtttgacttgagtgcaggagaggtaagtggaattcctagtgtagcggtgaaatgcgtagatattaggaggaacaccagtggcgaaggcggcttactggactgtaactgacgttgaggctcgaaagcgtggggagcaaacaggattagataccctggtagtccacgccgtaaacgatgaatactaggtgtcgggggacaaagtccttcggtgccgccgctaacgcaataagtattccacctggggagtacgttcgcaagaatgaaactcaaaggaattgacggggacccgcacaagcgg

SEQ ID NO: 44 - DNA, 1548 bp, Artificial Sequence
  Clostridium_leptum.GCF_000154345.EBFLKIBH_01280 16S ribosomal RNA
tttagagagtttgatcctggctcaggacgaacgctggcggcgtgcctaacacatgcaagtcgaacggagttaaattcgacacccgagtatccggccgggaggcggggtgctgggggttggatttaacttagtggcggacgggtgagtaacgcgtgagtaacctgcctttcagagggggataacgttctgaaaagaacgctaataccgcataacatcaatttatcgcatgataggttgatcaaaggagcaatccgctggaagatggactcgcgtccgattagccagttggcggggtaacggcccaccaaagcgacgatcggtagccggactgagaggttgaacggccacattgggactgagacacggcccagactcctacgggaggcagcagtgggggatattgcacaatgggggaaaccctgatgcagcaacgccgcgtgagggaagaaggttttcggattgtaaacctctgttcttagtgacgataatgacggtagctaaggagaaagctccggctaactacgtgccagcagccgcggtaatacgtagggagcgagcgttgtccggatttactgggtgtaaagggtgcgtaggcggcgaggcaagtcaggcgtgaaatctatgggcttaacccataaactgcgcttgaaactgtcttgcttgagtgaagtagaggtaggcggaattcccggtgtagcggtgaaatgcgtagagatcgggaggaacaccagtggcgaaggcggcctactgggctttaactgacgctgaagcacgaaagcatgggtagcaaacaggattagataccctggtagtccatgccgtaaacgatgattactaggtgtggggggtctgaccccctccgtgccgcagttaacacaataagtaatccacctggggagtacggccgcaaggttgaaactcaaaggaattgacgggggcccgcacaagcagtggagtatgtggtttaattcgaagcaacgcgaagaaccttaccaggtcttgacatccgtctaacgaagcagagatgcattaggtgcccttcggggaaaggcgagacaggtggtgcatggttgtcgtcagctcgtgtcgtgagatgttgggttaagtcccgcaacgagcgcaacccttgtttctagttgctacgcaagagcactctagagagactgccgttgacaaaacggaggaaggtggggacgacgtcaaatcatcatgccccttatgacctgggccacacacgtactacaatggctgtaaacagagggaagcaaagccgcgaggtggagcaaaaccctaaaagcagtcccagttcggatcgcaggctgcaacccgcctgcgtgaagtcggaattgctagtaatcgcggatcagcatgccgcggtgaatacgttcccgggccttgtacacaccgcccgtcacaccatgggagccggtaatacccgaagccagtagttcaaccgcaaggagagcgctgtcgaaggtaggattggcgactggggtgaagtcgtaacaaggtagccgtatcggaaggtgcggctggatcacctccttt

SEQ ID NO: 45 - DNA, 1548 bp, Artificial Sequence; identical to SEQ ID NO: 44
  Clostridium_leptum.GCF_000154345.EBFLKIBH_02083 16S ribosomal RNA

SEQ ID NO: 46 - DNA, 1524 bp, Artificial Sequence
  Clostridium_ramosum.GCF_000154485.DBDELJNL_00399 16S ribosomal RNA
atggagagtttgatcctggctcaggatgaacgctggcggcgtgcctaatacatgcaagtcgaacgcgagcacttgtgctcgagtggcgaacgggtgagtaatacataagtaacctgccctagacagggggataactattggaaacgatagctaagaccgcataggtacggacactgcatggtgaccgtattaaaagtgcctcaaagcactggtagaggatggacttatggcgcattagctggttggcggggtaacggcccaccaaggcgacgatgcgtagccgacctgagagggtgaccggccacactgggactgagacacggcccagactcctacgggaggcagcagtagggaattttcggcaatgggggaaaccctgaccgagcaacgccgcgtgaaggaagaaggttttcggattgtaaacttctgttataaaggaagaacggcggctacaggaaatggtagccgagtgacggtactttattagaaagccacggctaactacgtgccagcagccgcggtaatacgtaggtggcaagcgttatccggaattattgggcgtaaagagggagcaggcggcagcaagggtctgtggtgaaagcctgaagcttaacttcagtaagccatagaaaccaggcagctagagtgcaggagaggatcgtggaattccatgtgtagcggtgaaatgcgtagatatatggaggaacaccagtggcgaaggcgacgatctggcctgcaactgacgctcagtcccgaaagcgtggggagcaaataggattagataccctagtagtccacgccgtaaacgatgagtactaagtgttggatgtcaaagttcagtgctgcagttaacgcaataagtactccgcctgagtagtacgttcgcaagaatgaaactcaaaggaattgacgggggcccgcacaagcggtggagcatgtggtttaattcgaagcaacgcgaagaaccttaccaggtcttgacatactcataaaggctccagagatggagagatagctatatgagatacaggtggtgcatggttgtcgtcagctcgtgtcgtgagatgttgggttaagtcccgcaacgagcgcaacccttatcgttagttaccatcattaagttggggactctagcgagactgccagtgacaagctggaggaaggcggggatgacgtcaaatcatcatgccccttatgacctgggctacacacgtgctacaatggatggtgcagagggaagcgaagccgcgaggtgaagcaaaacccataaaaccattctcagttcggattgtagtctgcaactcgactacatgaagttggaatcgctagtaatcgcgaatcagcatgtcgcggtgaatacgttctcgggccttgtacacaccgcccgtcacaccacgagagttgataacacccgaagccggtggcctaaccgcaaggaaggagctgtctaaggtgggattgatgattggggtgaagtcgtaacaaggtatccctacgggaacgtggggatggatcacctccttt

SEQ ID NO: 47 - DNA, 1522 bp, Artificial Sequence
  Erysipelotrichaceae_SC11.GCA_900066915.NFPLMCGC_00592 16S ribosomal RNA
atggagagtttgatcctggctcaggatgaacgctggcggcgtgcctaatacatgcaagtcgaacgcttcacttcggtgaagagtggcgaacgggtgagtaatacataagtaacctggcatctacagggggataactgatggaaacgtcagctaagaccgcataggtgtagagatcgcatgaactctatatgaaaagtgctacgggactggtagatgatggacttatggcgcattagctggttggtagggtaacggcctaccaaggcgacgatgcgtagccgacctgagagggtgaccggccacactgggactgagacacggcccagactcctacgggaggcagcagtagggaattttcggcaatgggggaaaccctgaccgagcaacgccgcgtgaaggaagaagtaattcgttatgtaaacttctgtcatagaggaagaacggtggatatagggaatgatatccaagtgacggtactctataagaaagccacggctaactacgtgccagcagccgcggtaatacgtaggtggcgagcgttatccggaattattgggcgtaaagagggagcaggcggcactaagggtctgtggtgaaagatcgaagcttaacttcggtaagccatggaaaccgtagagctagagtgtgtgagaggatcgtggaattccatgtgtagcggtgaaatgcgtagatatatggaggaacaccagtggcgaaggcgacgatctggcgcataactgacgctcagtcccgaaagcgtggggagcaaataggattagataccctagtagtccacgccgtaaacgatgagtactaagtgttgggtgtcaaagctcagtgctgcagttaacgcaataagtactccgcctgagtagtacgttcgcaagaatgaaactcaaaggaattgacgggggcccgcacaagcggtggagcatgtggtttaattcgaagcaacgcgaagaaccttaccaggtcttgacatcgatctaaaggctccagagatggagagatagctatagagaagacaggtggtgcatggttgtcgtcagctcgtgtcgtgagatgttgggttaagtcccgcaacgagcgcaacccctgttgccagttgccagcattaagttggggactctggcgagactgccggtgacaagccggaggaaggcggggatgacgtcaaatcatcatgccccttatgacctgggctacacacgtgctacaatggacagagcagagggaagcgaagccgcgaggtggagcgaaacccataaaactgttctcagttcggactgcagtctgcaactcgactgcacgaagatggaatcgctagtaatcgcgaatcagcatgtcgcggtgaatacgttctcgggccttgtacacaccgcccgtcacaccatgagagtcggtaacacccgaagccggtggcctaaccgcaaggaaggagctgtctaaggtgggactgatgattggggtgaagtcgtaacaaggtatccctacgggaacgtggggatggatcacctccttt

SEQ ID NO: 48 - DNA, 1526 bp, Artificial Sequence
  Clostridium_SC125.GCA_900066805.HEBHMANF_02162 16S ribosomal RNA
tttagagagtttgatcctggctcaggatgaacgctggcggcgtgcctaacacatgcaagtcgaacggggttattttggaaatctcttcggagatggaattcttaacctagtggcggacgggtgagtaacgcgtgagcaatctgcctttaggagggggataacagtcggaaacggctgctaataccgcataatacgtttgggaggcatctcttgaacgtcaaagattttatcgcctttagatgagctcgcgtctgattagctggttggcggggtaacggcccaccaaggcgacgatcagtagccggactgagaggttgaacggccacattgggactgagacacggcccagactcctacgggaggcagcagtggggaatattgcgcaatgggggaaaccctgacgcagcaacgccgcgtgattgaagaaggccttcgggttgtaaagatctttaatcagggacgaaaaatgacggtacctgaagaataagctccggctaactacgtgccagcagccgcggtaatacgtagggagcaagcgttatccggatttactgggtgtaaagggcgcgcaggcgggccggcaagttgggagtgaaatcccggggcttaaccccggaactgctttcaaaactgctggtcttgagtgatggagaggcaggcggaattccgtgtgtagcggtgaaatgcgtagatatacggaggaacaccagtggcgaaggcggcctgctggacattaactgacgctgaggcgcgaaagcgtggggagcaaacaggattagataccctggtagtccacgccgtaaacgatggatactaggtgtgggaggtattgaccccttccgtgccgcagttaacacaataagtatcccacctggggagtacggccgcaaggttgaaactcaaaggaattgacgggggcccgcacaagcagtggagtatgtggtttaattcgaagcaacgcgaagaaccttaccaggtcttgacatcccgatgaccggcgtagagatacgccctctcttcggagcatcggtgacaggtggtgcatggttgtcgtcagctcgtgtcgtgagatgttgggttaagtcccgcaacgagcgcaacccttacggttagttgatacgcaagatcactctagccggactgccgttgacaaaacggaggaaggtggggacgacgtcaaatcatcatgccccttatgacctgggctacacacgtactacaatggcagtcatacagagggaagcaataccgcgaggtggagcaaatccctaaaagctgtcccagttcagattgcaggctgcaacccgcctgcatgaagtcggaattgctagtaatcgcggatcagcatgccgcggtgaatacgttcccgggccttgtacacaccgcccgtcacaccatgagagccgtcaatacccgaagtccgtagcctaaccgcaaggggggcgcggccgaaggtaggggtggtaattagggtgaagtcgtaacaaggtagccgtatcggaaggtgcggctggatcacctccttt

SEQ ID NO: 49 - DNA, 1515 bp, Artificial Sequence
  Lachnospiraceae_SC188.GCA_900066365.OIBDOBNI_03045 16S ribosomal RNA
atgagagtttgatcctggctcaggatgaacgctggcggcgtgcctaacacatgcaagtcgaacggaatttacatgaagcctagcgattgtaaatttagtggcggacgggtgagtaacgcgtgggtaacctgccttgtactgggggacaacagttggaaacgactgctaataccgcataagcgcacagcttcgcatgaagcagtgtgaaaaactccggtggtacaagatggacccgcgtctgattagctggttggtgaggtaacggcccaccaaggcgacgatcagtagccggcctgagagggtgaacggccacattgggactgagacacggcccaaactcctacgggaggcagcagtggggaatattgcacaatgggggaaaccctgatgcagcaacgccgcgtgagtgaagaagtatttcggtatgtaaagctctatcagcaggaaagaaaatgacggtacctgactaagaagccccggctaactacgtgccagcagccgcggtaatacgtagggggcaagcgttatccggatttactgggtgtaaagggagcgtagacggttttgcaagtctgaagtgaaagcccggggcttaaccccgggactgctttggaaactgtaggactagagtgcaggagaggtaagtggaattcctagtgtagcggtgaaatgcgtagatattaggaggaacaccagtggcgaaggcggcttactggactgtaactgacgttgaggctcgaaagcgtggggagcaaacaggattagataccctggtagtccacgccgtaaacgatgattactaggtgttggtgggtacgacccatcggtgccgcagcaaacgcaataagtaatccacctggggagtacgttcgcaagaatgaaactcaaaggaattgacggggacccgcacaagcggtggagcatgtggtttaattcgaagcaacgcgaagaaccttacctggtcttgacatccctatgaataacgggcaatgccgttagtacttcggtacataggagacaggtggtgcatggttgtcgtcagctcgtgtcgtgagatgttgggttaagtcccgcaacgagcgcaacccttatctttagtagccagcagtaagatgggcactctagagagactgccggggataacccggaggaaggtggggatgacgtcaaatcatcatgccccttatgaccagggctacacacgtgctacaatggcgtaaacaaagagaagcgaagtcgtgaggcagagcgaatctcaaaaataacgtctcagttcggattgtagtctgcaactcgactacatgaagctggaatcgctagtaatcgcagatcagaatgctgcggtgaatacgttcccgggtcttgtacacaccgcccgtcacaccatgggagtcggaaatgcccgaagtcggtgacctaaccgaaaggaaggagccgccgaaggcaggtctgataactggggtgaagtcgtaacaaggtagccgtatcggaaggtgcggctggatcacctccttt

SEQ ID NO: 50 - DNA, 1420 bp, Artificial Sequence
  Lachnospiraceae_SC52.SPC10801.PLHJGIDB_03707 16S ribosomal RNA
tagtggcggacgggtgagtaacgcgtgggtaacctgccttgtactgggggacaacagttggaaacgactgctaataccgcataagcgcacagcttcgcatgaagcagtgtgaaaaactccggtggtacaagatggacccgcgtctgattagctggttggtgaggtaacggcccaccaaggcgacgatcagtagccggcctgagagggtgaacggccacattgggactgagacacggcccaaactcctacgggaggcagcagtggggaatattgcacaatgggggaaaccctgatgcagcaacgccgcgtgagtgaagaagtatttcggtatgtaaagctctatcagcaggaaagaaaatgacggtacctgactaagaagccccggctaactacgtgccagcagccgcggtaatacgtagggggcaagcgttatccggatttactgggtgtaaagggagcgtagacggttttgcaagtctgaagtgaaagcccggggcttaaccccgggactgctttggaaactgtagaactagagtgcaggagaggtaagtggaattcctagtgtagcggtgaaatgcgtagatattaggaggaacaccagtggcgaaggcggcttactggactgtaactgacgttgaggctcgaaagcgtggggagcaaacaggattagataccctggtagtccacgccgtaaacgatgattactaggtgttggtgggtacgacccatcggtgccgcagcaaacgcaataagtaatccacctggggagtacgttcgcaagaatgaaactcaaaggaattgacggggacccgcacaagcggtggagcatgtggtttaattcgaagcaacgcgaagaaccttacctggtcttgacatccctatgaataacgggcaatgccgttagtacttcggtacataggagacaggtggtgcatggttgtcgtcagctcgtgtcgtgagatgttgggttaagtcccgcaacgagcgcaacccttatctttagtagccagcagtaagatgggcactctagagagactgccggggataacccggaggaaggtggggatgacgtcaaatcatcatgccccttatgaccagggctacacacgtgctacaatggcgtaaacaaagagaagcgaagtcgtgaggcagagcgaatctcaaaaataacgtctcagttcggattgtagtctgcaactcgactacatgaagctggaatcgctagtaatcgcagatcagaatgctgcggtgaatacgttcccgggtcttgtacacaccgcccgtcacaccatgggagtcggaaatgcccgaagtcggtgacctaaccgcaaggaaggagccgccgaaggcaggtctgataactggggtgaagtcgtaacaaggtagccgtatcggaaggtgcggctggatcacctccttt

SEQ ID NO: 51 - DNA, 1527 bp, Artificial Sequence
  Clostridium_symbiosum.GCF_000466485.MLALJMBA_01519 16S ribosomal RNA
atgagagtttgatcctggctcaggatgaacgctggcggcgtgcctaacacatgcaagtcgaacgaagcgatttaacggaagttttcggatggaagttgaattgactgagtggcggacgggtgagtaacgcgtgggtaacctgccttgtactgggggacaacagttagaaatgactgctaataccgcataagcgcacagtattgcatgatacagtgtgaaaaactccggtggtacaagatggacccgcgtctgattagctagttggtaaggtaacggcttaccaaggcgacgatcagtagccgacctgagagggtgaccggccacattgggactgagacacggcccaaactcctacgggaggcagcagtggggaatattgcacaatgggcgaaagcctgatgcagcgacgccgcgtgagtgaagaagtatttcggtatgtaaagctctatcagcagggaagaaaatgacggtacctgactaagaagccccggctaactacgtgccagcagccgcggtaatacgtagggggcaagcgttatccggatttactgggtgtaaagggagcgtagacggtaaagcaagtctgaagtgaaagcccgcggctcaactgcgggactgctttggaaactgtttaactggagtgtcggagaggtaagtggaattcctagtgtagcggtgaaatgcgtagatattaggaggaacaccagtggcgaaggcgacttactggacgataactgacgttgaggctcgaaagcgtggggagcaaacaggattagataccctggtagtccacgccgtaaacgatgaatactaggtgttggggagcaaagctcttcggtgccgtcgcaaacgcagtaagtattccacctggggagtacgttcgcaagaatgaaactcaaaggaattgacggggacccgcacaagcggtggagcatgtggtttaattcgaagcaacgcgaagaaccttaccaggtcttgacatcgatccgacgggggagtaacgtccccttcccttcggggcggagaagacaggtggtgcatggttgtcgtcagctcgtgtcgtgagatgttgggttaagtcccgcaacgagcgcaacccttattctaagtagccagcggttcggccgggaactcttgggagactgccagggataacctggaggaaggtggggatgacgtcaaatcatcatgccccttatgatctgggctacacacgtgctacaatggcgtaaacaaagagaagcaagaccgcgaggtggagcaaatctcaaaaataacgtctcagttcggactgcaggctgcaactcgcctgcacgaagctggaatcgctagtaatcgcgaatcagaatgtcgcggtgaatacgttcccgggtcttgtacacaccgcccgtcacaccatgggagtcagtaacgcccgaagtcagtgacccaaccgcaaggagggagctgccgaaggcgggaccgataactggggtgaagtcgtaacaaggtagccgtatcggaaggtgcggctggatcacctccttt

SEQ ID NO: 52 - DNA, 1565 bp, Artificial Sequence
  Dialister_invisus.GCF_000160055.ONFICEAE_00534 16S ribosomal RNA
atggagagtttgatcctggctcaggacgaacgctggcggcgtgcttaacacatgcaagtcgaacgaaaagacggaaagagcttgctcttttcagaattgagtggcaaacgggtgagtaacacgtaaacaacctgccttcaggatggggacaacagacggaaacgactgctaataccgaataagttccaagagccgcatggcccatggaagaaaaggtggcctctacctgtaagctatcgcctgaagaggggtttgcgtctgattagctggttggaggggtaacggcccaccaaggcgacgatcagtagccggtctgagaggatgaacggccacactggaactgagacacggtccagactcctacgggaggcagcagtggggaatcttccgcaatgggcgaaagcctgacggagcaacgccgcgtgagtgatgacggccttcgggttgtaaaactctgtgatccgggacgaaaaggcagagtgcgaagaacaaactgcattgacggtaccggaaaagcaagccacggctaactacgtgccagcagccgcggtaatacgtaggtggcaagcgttgtccggaattattgggcgtaaagcgcgcgcaggcggcttcccaagtccctcttaaaagtgcggggcttaaccccgtgatgggaaggaaactgggaagctggagtatcggagaggaaagtggaattcctagtgtagcggtgaaatgcgtagagattaggaagaacaccggtggcgaaggcgactttctggacgaaaactgacgctgaggcgcgaaagcgtggggagcaaacaggattagataccctggtagtccacgccgtaaacgatggatactaggtgtaggaggtatcgacccctcctgtgccggagttaacgcaataagtatcccgcctgggaagtacgatcgcaagattaaaactcaaaggaattgacggggcccgcacaagcggtggagtatgtggtttaattcgacgcaacgcgaagaaccttaccaggtcttgacattgatcgcgatctgcagaaatgcggagttcttcttcggaagacgagaaaacaggtggtgcacggctgtcgtcagctcgtgtcgtgagatgttgggttaagtcccgcaacgagcgcaacccctatcatttgttaccagcacgtaaaggtggggactcaaatgagaccgccgcggacaacgcggaggaaggcggggacgacgtcaagtcatcatgccccttatgacctgggctacacacgtactacaatgggtgtcaacaaagagaagcgaacccgcgaggaagagcaaacctcaaaaacacacccccagttcagatcgcaggctgcaacccgcctgcgtgaagtaggaatcgctagtaatcgcgggtcagcataccgcggtgaatacgttcccgggccttgtacacaccgcccgtcacactatgagagtcagaaacacccgaagccggtgaggtaaccgcaaggagccagccgtcgaaggcggagctgatgattggagtgaagtcgtaacaaggtagccgtatcggaaggtgcggctggatcacctccttt

SEQ ID NO: 53 - DNA, 1566 bp, Artificial Sequence
  Dialister_invisus.GCF_000160055.ONFICEAE_00810 16S ribosomal RNA
atggagagtttgatcctggctcaggacgaacgctggcggcgtgcttaacacatgcaagtcgaacgaaaagagggaaagagcttgctctttccggaattgagtggcaaacgggtgagtaacacgtaaacaacctgccttcaggatggggacaacagacggaaacgactgctaataccgaataagttccaagagccgcatggcccatggaagaaaaggtggcctctacctgtaagctatcgcctgaagaggggtttgcgtctgattagctggttggaggggtaacggcccaccaaggcgacgatcagtagccggtctgagaggatgaacggccacactggaactgagacacggtccagactcctacgggaggcagcagtggggaatcttccgcaatgggcgaaagcctgacggagcaacgccgcgtgagtgatgacggccttcgggttgtaaaactctgtgatccgggacgaaaaggcagagtgcgaagaacaaactgcattgacggtaccggaaaagcaagccacggctaactacgtgccagcagccgcggtaatacgtaggtggcaagcgttgtccggaattattgggcgtaaagcgcgcgcaggcggcttcccaagtccctcttaaaagtgcggggcttaaccccgtgatgggaaggaaactgggaagctggagtatcggagaggaaagtggaattcctagtgtagcggtgaaatgcgtagagattaggaagaacaccggtggcgaaggcgactttctggacgaaaactgacgctgaggcgcgaaagcgtggggagcaaacaggattagataccctggtagtccacgccgtaaacgatggatactaggtgtaggaggtatcgacccctcctgtgccggagttaacgcaataagtatcccgcctgggaagtacgatcgcaagattaaaactcaaaggaattgacgggggcccgcacaagcggtggagtatgtggtttaattcgacgcaacgcgaagaaccttaccaggtcttgacattgatcgcgatctgcagaaatgcggagttcttcttcggaagacgagaaaacaggtggtgcacggctgtcgtcagctcgtgtcgtgagatgttgggttaagtcccgcaacgagcgcaacccctatcatttgttaccagcacgtaaaggtggggactcaaatgagaccgccgcggacaacgcggaggaaggcggggacgacgtcaagtcatcatgccccttatgacctgggctacacacgtactacaatgggtgtcaacaaagagaagcgaacccgcgaggaagagcaaacctcaaaaacacacccccagttcagatcgcaggctgcaacccgcctgcgtgaagtaggaatcgctagtaatcgcgggtcagcataccgcggtgaatacgttcccgggccttgtacacaccgcccgtcacactatgagagtcagaaacacccgaagccggtgaggtaaccgcaaggagccagccgtcgaaggcggagctgatgattggagtgaagtcgtaacaaggtagccgtatcggaaggtgcggctggatcacctccttt

SEQ ID NO: 54 - DNA, 1566 bp, Artificial Sequence
  Dialister_invisus.GCF_000160055.ONFICEAE_01219 16S ribosomal RNA
atggagagtttgatcctggctcaggacgaacgctggcggcgtgcttaacacatgcaagtcgaacgaaaagacggaaagagcttgctcttttcagaattgagtggcaaacgggtgagtaacacgtaaacaacctgccttcaggatggggacaacagacggaaacgactgctaatgccgaataagttccaagagccgcatggcccatggaagaaaaggtggcctctacctgtaagctatcgcctgaagaggggtttgcgtctgattagctggttggaggggtaacggcccaccaaggcgacgatcagtagccggtctgagaggatgaacggccacactggaactgagacacggtccagactcctacgggaggcagcagtggggaatcttccgcaatgggcgaaagcctgacggagcaacgccgcgtgagtgatgacggccttcgggttgtaaaactctgtgatccgggacgaaaaggcagagtgcgaagaacaaactgcattgacggtaccggaaaagcaagccacggctaactacgtgccagcagccgcggtaatacgtaggtggcaagcgttgtccggaattattgggcgtaaagcgcgcgcaggcggcttcccaagtccctcttaaaagtgcggggcttaaccccgtgatgggaaggaaactgggaagctggagtatcggagaggaaagtggaattcctagtgtagcggtgaaatgcgtagagattaggaagaacaccggtggcgaaggcgactttctggacgaaaactgacgctgaggcgcgaaagcgtggggagcaaacaggattagataccctggtagtccacgccgtaaacgatggatactaggtgtaggaggtatcgacccctcctgtgccggagttaacgcaataagtatcccgcctgggaagtacgatcgcaagattaaaactcaaaggaattgacgggggcccgcacaagcggtggagtatgtggtttaattcgacgcaacgcgaagaaccttaccaggtcttgacattgatcgcgatctgcagaaatgcggagttcttcttcggaagacgagaaaacaggtggtgcacggctgtcgtcagctcgtgtcgtgagatgttgggttaagtcccgcaacgagcgcaacccctatcatttgttaccagcacgtaaaggtggggactcaaatgagaccgccgcggacaacgcggaggaaggcggggacgacgtcaagtcatcatgccccttatgacctgggctacacacgtactacaatgggtgtcaacaaagagaagcgaacccgcgaggaagagcaaacctcaaaaacacacccccagttcagatcgcaggctgcaacccgcctgcgtgaagtaggaatcgctagtaatcgcgggtcagcataccgcggtgaatacgttcccgggccttgtacacaccgcccgtcacactatgagagtcagaaacacccgaagccggtgaggtaaccgcaaggagccagccgtcgaaggcggagctgatgattggagtgaagtcgtaacaaggtagccgtatcggaaggtgcggctggatcacctccttt

SEQ ID NO: 55 - DNA, 1530 bp, Artificial Sequence
  Eubacterium_contortum_SC46.SPC10987.PGIJJNHC_00268 16S ribosomal RNA
aacgagagtttgatcctggctcaggatgaacgctggcggcgtgcttaacacatgcaagtcgagcgaagcgctttacttagatttcttcggattgaagagttttgcgactgagcggcggacgggtgagtaacgcgtgggtaacctgcctcatacagggggataacagttagaaatgactgctaataccgcataagaccacagtaccgcatggtaccgtgggaaaaactccggtggtatgagatggacccgcgtctgattagctagttggtaaggtaacggcttaccaaggcgacgatcagtagccgacctgagagggtgaccggccacattgggactgagacacggcccaaactcctacgggaggcagcagtggggaatattgcacaatgggggaaaccctgatgcagcgacgccgcgtgaaggatgaagtatttcggtatgtaaacttctatcagcagggaagaaaatgacggtacctgactaagaagccccggctaactacgtgccagcagccgcggtaatacgtagggggcaagcgttatccggatttactgggtgtaaagggagcgtagacggttatgtaagtctgatgtgaaaacccggggctcaaccccgggactgcattggaaactatgtaactagagtgtcggagaggtaagtggaattcctagtgtagcggtgaaatgcgtagatattaggaggaacaccagtggcgaaggcggcttactggacgatgactgacgttgaggctcgaaagcgtggggagcaaacaggattagataccctggtagtccacgccgtaaacgatgcatactaggtgtcgggtggcaaagccattcggtgccgcagcaaacgcaataagtatgccacctggggagtacgttcgcaagaatgaaactcaaaggaattgacggggacccgcacaagcggtggagcatgtggtttaattcgaagcaacgcgaagaaccttacctgctcttgacatccccctgaccggcgcgtaatggtgcctttccttcgggacaggggagacaggtggtgcatggttgtcgtcagctcgtgtcgtgagatgttgggttaagtcccgcaacgagcgcaacccttatctttagtagccagcggttcggccgggcactctagagagactgccagggataacctggaggaaggtggggatgacgtcaaatcatcatgccccttatgagcagggctacacacgtgctacaatggcgtaaacaaagggaggcgaagccgcgaggtggagcaaatcccaaaaataacgtctcagttcggattgtagtctgcaactcgactacatgaagctggaatcgctagtaatcgcgaatcagaatgtcgcggtgaatacgttcccgggtcttgtacacaccgcccgtcacaccatgggagttggtaacgcccgaagtcagtgacccaaccgtaaggagggagctgccgaaggtgggaccgataactggggtgaagtcgtaacaaggtagccgtatcggaaggtgcggctggatcacctccttt

SEQ ID NO: 56 - DNA, 1530 bp, Artificial Sequence
  Eubacterium_contortum_SC46.SPC10987.PGIJJNHC_03558 16S ribosomal RNA
aacgagagtttgatcctggctcaggatgaacgctggcggcgtgcttaacacatgcaagtcgagcgaagcgctttacttagatttcttcggattgaagagttttgcgactgagcggcggacgggtgagtaacgcgtgggtaacctgcctcatacagggggacaacagttagaaatgactgctaataccgcataagaccacggtaccgcatggtacagtgggaaaaactccggtggtatgagatggacccgcgtctgattagctagttggtaaggtaacggcttaccaaggcgacgatcagtagccgacctgagagggtgaccggccacattgggactgagacacggcccaaactcctacgggaggcagcagtggggaatattgcacaatgggggaaaccctgatgcagcgacgccgcgtgaaggatgaagtatttcggtatgtaaacttctatcagcagggaagaaaatgacggtacctgactaagaagccccggctaactacgtgccagcagccgcggtaatacgtagggggcaagcgttatccggatttactgggtgtaaagggagcgtagacggttatgtaagtctgatgtgaaaacccggggctcaaccccgggactgcattggaaactatgtaactagagtgtcggagaggtaagtggaattcctagtgtagcggtgaaatgcgtagatattaggaggaacaccagtggcgaaggcggcttactggacgatgactgacgttgaggctcgaaagcgtggggagcaaacaggattagataccctggtagtccacgccgtaaacgatgcatactaggtgtcgggtggcaaagccattcggtgccgcagcaaacgcaataagtatgccacctggggagtacgttcgcaagaatgaaactcaaaggaattgacggggacccgcacaagcggtggagcatgtggtttaattcgaagcaacgcgaagaaccttacctgctcttgacatccccctgaccggcgcgtaatggtgcctttccttcgggacaggggagacaggtggtgcatggttgtcgtcagctcgtgtcgtgagatgttgggttaagtcccgcaacgagcgcaacccttatctttagtagccagcggttcggccgggcactctagagagactgccagggataacctggaggaaggtggggatgacgtcaaatcatcatgccccttatgagcagggctacacacgtgctacaatggcgtaaacaaagggaggcgaagccgcgaggtggagcaaatcccaaaaataacgtctcagttcggattgtagtctgcaactcgactacatgaagctggaatcgctagtaatcgcgaatcagaatgtcgcggtgaatacgttcccgggtcttgtacacaccgcccgtcacaccatgggagttggtaacgcccgaagtcagtgacccaaccgtaaggagggagctgccgaaggtgggaccgataactggggtgaagtcgtaacaaggtagccgtatcggaaggtgcggctggatcacctccttt

SEQ ID NO: 57 - DNA, 1530 bp, Artificial Sequence
  Eubacterium_contortum_SC46.SPC10987.PGIJJNHC_03567 16S ribosomal RNA
aacgagagtttgatcctggctcaggatgaacgctggcggcgtgcttaacacatgcaagtcgagcgaagcgctttacttagatttcttcggattgaagagttttgcgactgagcggcggacgggtgagtaacgcgtgggtaacctgcctcatacagggggataacagttagaaatgactgctaataccgcataagaccacggtaccgcatggtacagtgggaaaaactccggtggtatgagatggacccgcgtctgattagctagttggtaaggtaacggcttaccaaggcgacgatcagtagccgacctgagagggtgaccggccacattgggactgagacacggcccaaactcctacgggaggcagcagtggggaatattgcacaatgggggaaaccctgatgcagcgacgccgcgtgaaggatgaagtatttcggtatgtaaacttctatcagcagggaagaaaatgacggtacctgactaagaagccccggctaactacgtgccagcagccgcggtaatacgtagggggcaagcgttatccggatttactgggtgtaaagggagcgtagacggttatgtaagtctgatgtgaaaacccggggctcaaccccgggactgcattggaaactatgtaactagagtgtcggagaggtaagtggaattcctagtgtagcggtgaaatgcgtagatattaggaggaacaccagtggcgaaggcggcttactggacgatgactgacgttgaggctcgaaagcgtggggagcaaacaggattagataccctggtagtccacgccgtaaacgatgcatactaggtgtcgggtggcaaagccattcggtgccgcagcaaacgcaataagtatgccacctggggagtacgttcgcaagaatgaaactcaaaggaattgacggggacccgcacaagcggtggagcatgtggtttaattcgaagcaacgcgaagaaccttacctgctcttgacatccccctgaccggcgcgtaatggtgcctttccttcgggacaggggagacaggtggtgcatggttgtcgtcagctcgtgtcgtgagatgttgggttaagtcccgcaacgagcgcaacccttatctttagtagccagcggttcggccgggcactctagagagactgccagggataacctggaggaaggtggggatgacgtcaaatcatcatgccccttatgagcagggctacacacgtgctacaatggcgtaaacaaagggaggcgaagccgcgaggtggagcaaatcccaaaaataacgtctcagttcggattgtagtctgcaactcgactacatgaagctggaatcgctagtaatcgcgaatcagaatgtcgcggtgaatacgttcccgggtcttgtacacaccgcccgtcacaccatgggagttggtaacgcccgaagtcagtgacccaaccgtaaggagggagctgccgaaggtgggaccgataactggggtgaagtcgtaacaaggtagccgtatcggaaggtgcggctggatcacctccttt

SEQ ID NO: 58 - DNA, 1530 bp, Artificial Sequence
  Eubacterium_contortum_SC46.SPC10987.PGIJJNHC_04151 16S ribosomal RNA
aacgagagtttgatcctggctcaggatgaacgctggcggcgtgcttaacacatgcaagtcgagcgaagcactttacttagatttcttcggaatgaagagtgttgtgactgagcggcggacgggtgagtaacgcgtgggtaacctgcctcatacagggggataacagttagaaatgactgctaataccgcataagaccacggtaccgcatggtacagtgggaaaaactccggtggtatgagatggacccgcgtctgattagctagttggtaaggtaacggcttaccaaggcgacgatcagtagccgacctgagagggtgaccggccacattgggactgagacacggcccaaactcctacgggaggcagcagtggggaatattgcacaatgggggaaaccctgatgcagcgacgccgcgtgaaggatgaagtatttcggtatgtaaacttctatcagcagggaagaaaatgacggtacctgactaagaagccccggctaactacgtgccagcagccgcggtaatacgtagggggcaagcgttatccggatttactgggtgtaaagggagcgtagacggttatgtaagtctgatgtgaaaacccggggctcaaccccgggactgcattggaaactatgtaactagagtgtcggagaggtaagtggaattcctagtgtagcggtgaaatgcgtagatattaggaggaacaccagtggcgaaggcggcttactggacgatgactgacgttgaggctcgaaagcgtggggagcaaacaggattagataccctggtagtccacgccgtaaacgatgcatactaggtgtcgggtggcaaagccattcggtgccgcagcaaacgcaataagtatgccacctggggagtacgttcgcaagaatgaaactcaaaggaattgacggggacccgcacaagcggtggagcatgtggtttaattcgaagcaacgcgaagaaccttacctgctcttgacatccccctgaccggcgcgtaatggtgcctttccttcgggacaggggagacaggtggtgcatggttgtcgtcagctcgtgtcgtgagatgttgggttaagtcccgcaacgagcgcaacccttatctttagtagccagcggttcggccgggcactctagagagactgccagggataacctggaggaaggtggggatgacgtcaaatcatcatgccccttatgagcagggctacacacgtgctacaatggcgtaaacaaagggaggcgaagccgcgaggtggagcaaatcccaaaaataacgtctcagttcggattgtagtctgcaactcgactacatgaagctggaatcgctagtaatcgcgaatcagaatgtcgcggtgaatacgttcccgggtcttgtacacaccgcccgtcacaccatgggagttggtaacgcccgaagtcagtgacccaaccgtaaggagggagctgccgaaggtgggaccgataactggggtgaagtcgtaacaaggtagccgtatcggaaggtgcggctggatcacctccttt

SEQ ID NO: 59 - DNA, 1505 bp, Artificial Sequence
  Eubacterium_siraeum.GCF_000154325.NCECJGME_00373 16S ribosomal RNA
caaagagtttgatcctggctcaggacgaacgctggcggcgcgcctaacacatgcaagtcgaacggtgaagaggagcttgctcctcggatcagtggcggacgggtgagtaacacgtgagcaacctggctctaagagggggacaacagttggaaacgactgctaataccgcataacgtatcgggatggcatcttcctgataccaaagattttatcgcttagagatgggctcgcgtctgattagatagttggcggggtaacggcccaccaagtcgacgatcagtagccggactgagaggttgaacggccacattgggactgagacacggcccagactcctacgggaggcagcagtgggggatattggacaatgggggcaaccctgatccagcgacgccgcgtgagggaagaaggttttcggattgtaaacctctgttgacggagaaaaaaatgatggtatccgtttagaaagccacggctaactacgtgccagcagccgcggtaatacgtaggtggcaagcgttgtccggaattactgggtgtaaagggagtgtaggcgggatatcaagtcagaagtgaaaattacgggctcaactcgtaacctgcttttgaaactgacattcttgagtgaagtagaggcaagcggaattcctagtgtagcggtgaaatgcgtagatattaggaggaacaccagtggcgaaggcggcttgctgggcttttactgacgctgaggctcgaaagcgtggggagcaaacaggattagataccctggtagtccacgccgtaaacgatgattactaggtgtggggggattgaccccttccgtgccggagtaaacacaataagtaatccacctggggagtacgaccgcaaggttgaaactcaaaggaattgacgggggcccgcacaagcagtggagtatgtggtttaattcgacgcaacgcgaagaaccttaccaggtcttgacatcgagtgaccgcctaagagattaggctttcccttcggggacacaaagacaggtggtgcatggttgtcgtcagctcgtgtcgtgagatgttgggttaagtcccgcaacgagcgcaacccttatcattagttgctacgcaagagcactctaatgagactgccgttgacaaaacggaggaaggtggggatgacgtcaaatcatcatgccctttatgacctgggctacacacgtactacaatggcgtttaacaaagagaagcaaagccgcgaggcagagcaaatctccaaaaaacgtctcagttcggattgtaggctgcaactcgcctacatgaagtcggaattgctagtaatcgtaggtcagcatactacggtgaatacgttcccgggccttgtacacaccgcccgtcaaaccatgagagttggcaacacccgaagtcggtagtctaaccgcaaggaggacgccgccgaaggtggggttgatgattagggttaagtcgtaacaaggtagccgtatcggaaggtgcggctggatcacctccttt

SEQ ID NO: 60 - DNA, 1505 bp, Artificial Sequence
  Eubacterium_siraeum.GCF_000154325.NCECJGME_01093 16S ribosomal RNA
caaagagtttgatcctggctcaggacgaacgctggcggcgcgcctaacacatgcaagtcgaacggtgaagaggagcttgctcctcggaacagtggcggacgggtgagtaacacgtgagcaacctggctctaagagggggacaacagttggaaacgactgctaataccgcataacgtatcgggatggcatcttcctgataccaaagattttatcgcttagagatgggctcgcgtctgattagatagttggcggggtaacggcccaccaagtcgacgatcagtagccggactgagaggttgaacggccacattgggactgagacacggcccagactcctacgggaggcagcagtgggggatattggacaatgggggcaaccctgatccagcgacgccgcgtgagggaagaaggttttcggattgtaaacctctgttgacggagaaaaaaatgatggtatccgtttagaaagccacggctaactacgtgccagcagccgcggtaatacgtaggtggcaagcgttgtccggaattactgggtgtaaagggagtgtaggcgggatatcaagtcagaagtgaaaattacgggctcaactcgtaacctgcttttgaaactgacattcttgagtgaagtagaggcaagcggaattcctagtgtagcggtgaaatgcgtagatattaggaggaacaccagtggcgaaggcggcttgctgggcttttactgacgctgaggctcgaaagcgtggggagcaaacaggattagataccctggtagtccacgccgtaaacgatgattactaggtgtggggggattgaccccttccgtgccggagtaaacacaataagtaatccacctggggagtacgaccgcaaggttgaaactcaaaggaattgacgggggcccgcacaagcagtggagtatgtggtttaattcgacgcaacgcgaagaaccttaccaggtcttgacatcgagtgaccgcctaagagattaggctttcccttcggggacacaaagacaggtggtgcatggttgtcgtcagctcgtgtcgtgagatgttgggttaagtcccgcaacgagcgcaacccttatcattagttgctacgcaagagcactctaatgagactgccgttgacaaaacggaggaaggtggggatgacgtcaaatcatcatgccctttatgacctgggctacacacgtactacaatggcgtttaacaaagagaagcaaagccgcgaggcagagcaaatctccaaaaaacgtctcagttcggattgtaggctgcaactcgcctacatgaagtcggaattgctagtaatcgtaggtcagcatactacggtgaatacgttcccgggccttgtacacaccgcccgtcaaaccatgagagttggcaacacccgaagtcggtagtctaaccgcaaggaggacgccgccgaaggtggggttgatgattagggttaagtcgtaacaaggtagccgtatcggaaggtgcggctggatcacctccttt

SEQ ID NO: 61 - DNA, 1505 bp, Artificial Sequence
  Eubacterium_siraeum.GCF_000154325.NCECJGME_01403 16S ribosomal RNA
caaagagtttgatcctggctcaggacgaacgctggcggcgcgcctaacacatgcaagtcgaacggtgaagaggagcttgctcctcggatcagtggcggacgggtgagtaacacgtgagcaacctggctctaagagggggacaacagttggaaacgactgctaataccgcatgatgtatcgggatggcatcttcctgataccaaagattttatcgcttagagatgggctcgcgtctgattagatagttggcggggtaacggcccaccaagtcgacgatcagtagccggactgagaggttgaacggccacattgggactgagacacggcccagactcctacgggaggcagcagtgggggatattggacaatgggggcaaccctgatccagcgacgccgcgtgagggaagaaggttttcggattgtaaacctctgttgacggagaaaaaaatgatggtatccgtttagaaagccacggctaactacgtgccagcagccgcggtaatacgtaggtggcaagcgttgtccggaattactgggtgtaaagggagtgtaggcgggatatcaagtcagaagtgaaaattacgggctcaactcgtaacctgcttttgaaactgacattcttgagtgaagtagaggcaagcggaattcctagtgtagcggtgaaatgcgtagatattaggaggaacaccagtggcgaaggcggcttgctgggcttttactgacgctgaggctcgaaagcgtggggagcaaacaggattagataccctggtagtccacgccgtaaacgatgattactaggtgtggggggattgaccccttccgtgccggagtaaacacaataagtaatccacctggggagtacgaccgcaaggttgaaactcaaaggaattgacgggggcccgcacaagcagtggagtatgtggtttaattcgacgcaacgcgaagaaccttaccaggtcttgacatcgagtgaccgcctaagagattaggctttcccttcggggacacaaagacaggtggtgcatggttgtcgtcagctcgtgtcgtgagatgttgggttaagtcccgcaacgagcgcaacccttatcattagttgctacgcaagagcactctaatgagactgccgttgacaaaacggaggaaggtggggatgacgtcaaatcatcatgccctttatgacctgggctacacacgtactacaatggcgtttaacaaagagaagcaaagccgcgaggcagagcaaatctccaaaaaacgtctcagttcggattgtaggctgcaactcgcctacatgaagtcggaattgctagtaatcgtaggtcagcatactacggtgaatacgttcccgggccttgtacacaccgcccgtcaaaccatgagagttggcaacacccgaagtcggtagtctaaccgcaaggaggacgccgccgaaggtggggttgatgattagggttaagtcgtaacaaggtagccgtatcggaaggtgcggctggatcacctccttt

SEQ ID NO: 62 - DNA, 1505 bp, Artificial Sequence
  Eubacterium_siraeum.GCF_000154325.NCECJGME_01403 16S ribosomal RNA
caaagagtttgatcctggctcaggacgaacgctggcggcgcgcctaacacatgcaagtcgaacggtgaagaggagcttgctcctcggatcagtggcggacgggtgagtaacacgtgagcaacctggctctaagagggggacaacagttggaaacgactgctaataccgcataacgtatcgggatggcatcttcctgataccaaagattttatcgcttagagatgggctcgcgtctgattagatagttggcggggtaacggcccaccaagtcgacgatcagtagccggactgagaggttgaacggccacattgggactgagacacggcccagactcctacgggaggcagcagtgggggatattggacaatgggggcaaccctgatccagcgacgccgcgtgagggaagaaggttttcggattgtaaacctctgttgacggagaaaaaaatgatggtatccgtttagaaagccacggctaactacgtgccagcagccgcggtaatacgtaggtggcaagcgttgtccggaattactgggtgtaaagggagtgtaggcgggatatcaagtcagaagtgaaaattacgggctcaactcgtaacctgcttttgaaactgacattcttgagtgaagtagaggcaagcggaattcctagtgtagcggtgaaatgcgtagatattaggaggaacaccagtggcgaaggcggcttgctgggcttttactgacgctgaggctcgaaagcgtggggagcaaacaggattagataccctggtagtccacgccgtaaacgatgattactaggtgtggggggattgaccccttccgtgccggagtaaacacaataagtaatccacctggggagtacgaccgcaaggttgaaactcaaaggaattgacgggggcccgcacaagcagtggagtatgtggtttaattcgacgcaacgcgaagaaccttaccaggtcttgacatcgagtgaccgcctaagagattaggccttcccttcggggacacaaagacaggtggtgcatggttgtcgtcagctcgtgtcgtgagatgttgggttaagtcccgcaacgagcgcaacccttatcattagttgctacgcaagagcactctaatgagactgccgttgacaaaacggaggaaggtggggatgacgtcaaatcatcatgccctttatgacctgggctacacacgtactacaatggcgtttaacaaagagaagcaaagccgcgaggcagagcaaatctccaaaaaacgtctcagttcggattgtaggctgcaactcgcctacatgaagtcggaattgctagtaatcgtaggtcagcatactacggtgaatacgttcccgggccttgtacacaccgcccgtcaaaccatgagagttggcaacacccgaagtcggtagtctaaccgcaaggaggacgccgccgaaggtggggttgatgattagggttaagtcgtaacaaggtagccgtatcggaaggtgcggctggatcacctccttt

SEQ ID NO: 63 - DNA, 1530 bp, Artificial Sequence
  Flavonifractor_plautii.GCF_000239295.GPJGAEFO_00132 16S ribosomal RNA
tattgagagtttgatcctggctcaggatgaacgctggcggcgtgcttaacacatgcaagtcgaacggggtgctcatgacggaggattcgtccaatggattgagttacctagtggcggacgggtgagtaacgcgtgaggaacctgccttggagaggggaataacactccgaaaggagtgctaataccgcatgaagcagttgggtcgcatggctctgactgccaaagatttatcgctctgagatggcctcgcgtctgattagctagtaggcggggtaacggcccacctaggcgacgatcagtagccggactgagaggttgaccggccacattgggactgagacacggcccagactcctacgggaggcagcagtggggaatattgggcaatgggcgcaagcctgacccagcaacgccgcgtgaaggaagaaggctttcgggttgtaaacttcttttgtcggggacgaaacaaatgacggtacccgacgaataagccacggctaactacgtgccagcagccgcggtaatacgtaggtggcaagcgttatccggatttactgggtgtaaagggcgtgtaggcgggattgcaagtcagatgtgaaaactgggggctcaacctccagcctgcatttgaaactgtagttcttgagtgctggagaggcaatcggaattccgtgtgtagcggtgaaatgcgtagatatacggaggaacaccagtggcgaaggcggattgctggacagtaactgacgctgaggcgcgaaagcgtggggagcaaacaggattagataccctggtagtccacgccgtaaacgatggatactaggtgtggggggtctgaccccctccgtgccgcagttaacacaataagtatcccacctggggagtacgatcgcaaggttgaaactcaaaggaattgacgggggcccgcacaagcggtggagtatgtggtttaattcgaagcaacgcgaagaaccttaccagggcttgacatcccactaacgaggcagagatgcgttaggtgcccttcggggaaagtggagacaggtggtgcatggttgtcgtcagctcgtgtcgtgagatgttgggttaagtcccgcaacgagcgcaacccttattgttagttgctacgcaagagcactctagcgagactgccgttgacaaaacggaggaaggtggggacgacgtcaaatcatcatgccccttatgtcctgggccacacacgtactacaatggtggttaacagagggaggcaataccgcgaggtggagcaaatccctaaaagccatcccagttcggattgcaggctgaaacccgcctgtatgaagttggaatcgctagtaatcgcggatcagcatgccgcggtgaatacgttcccgggccttgtacacaccgcccgtcacaccatgagagtcgggaacacccgaagtccgtagcctaaccgcaaggagggcgcggccgaaggtgggttcgataattggggtgaagtcgtaacaaggtagccgtatcggaaggtgcggctggatcacctccttt

SEQ ID NO: 64 - DNA, 1529 bp, Artificial Sequence
  Flintibacter_SC49.GCA_900066645.DBEMCOBG_02766 16S ribosomal RNA
tattgagagtttgatcctggctcaggatgaacgctggcggcgtgcttaacacatgcaagtcgaacggagtgctcatgacagaggattcgtccaatggagtgagttacttagtggcggacgggtgagtaacgcgtgagtaacctgccttggagtggggaataacaggtggaaacatctgctaataccgcatgatgcagttgggtcgcatggctctgactgccaaagatttatcgctctgagatggactcgcgtctgattagctggttggcggggtaacggcccaccaaggcgacgatcagtagccggactgagaggttggccggccacattgggactgagacacggcccagactcctacgggaggcagcagtggggaatattgggcaatgggcgcaagcctgacccagcaacgccgcgtgaaggaagaaggctttcgggttgtaaacttcttttctcagggacgaagcaagtgacggtacctgaggaataagccacggctaactacgtgccagcagccgcggtaatacgtaggtggcgagcgttatccggatttactgggtgtaaagggcgtgtaggcgggactgcaagtcagatgtgaaaaccatgggctcaacctgtggcctgcatttgaaactgtagttcttgagtactggagaggcagacggaattcctagtgtagcggtgaaatgcgtagatattaggaggaacaccagtggcgaaggcggtctgctggacagcaactgacgctgaggcgcgaaagcgtggggagcaaacaggattagataccctggtagtccacgctgtaaacgatggatactaggtgtggggggtctgaccccctccgtgccgcagttaacacaataagtatcccacctggggagtacgatcgcaaggttgaaactcaaaggaattgacgggggcccgcacaagcggtggagtatgtggtttaattcgaagcaacgcgaagaaccttaccagggcttgacatcccggtgaccggtgtagagatacaccttcttcttcggaagcgccggtgacaggtggtgcatggttgtcgtcagctcgtgtcgtgagatgttgggttaagtcccgcaacgagcgcaacccttattgttagttgctacgcaagagcactctagcgagactgccgttgacaaaacggaggaaggtggggacgacgtcaaatcatcatgccccttatgtcctgggccacacacgtactacaatggtggtcaacagagggaagcaagaccgcgaggtggagcaaacccctaaaagccatcccagttcggattgcaggctgcaactcgcctgtatgaagttggaatcgctagtaatcgcggatcagcatgccgcggtgaatacgttcccgggccttgtacacaccgcccgtcacaccatgagagtcgggaacacccgaagtccgtagcctaaccgcaaggggggcgcggccgaaggtgggttcgataattggggtgaagtcgtaacaaggtagccgtatcggaaggtgcggctggatcacctccttt

SEQ ID NO: 65 - DNA, 1307 bp, Artificial Sequence
  Gemmiger_formicilis_SC193.SPC10676.BNNMOMCD_02995 16S ribosomal RNA
aaaaggatttattcgctttaggatggactcgcgtccaattagctagttggtgaggtaacggcccaccaaggcgacgattggtagccggactgagaggttgaacggccacattgggactgagacacggcccagactcctacgggaggcagcagtgggggatattgcacaatgggggaaaccctgatgcagcgacgccgcgtggaggaagaaggttttcggattgtaaactcctgtcgttagggacgataatgacggtacctaacaagaaagcaccggctaactacgtgccagcagccgcggtaaaacgtagggtgcaagcgttgtccggaattactgggtgtaaagggagcgcaggcgggaagacaagttggaagtgaaaaccatgggctcaacccatgaattgctttcaaaactgtttttcttgagtagtgcagaggtagatggaattcccggtgtagcggtggaatgcgtagatatcgggaggaacaccagtggcgaaggcggtctactgggcaccaactgacgctgaggctcgaaagcatgggtagcaaacaggattagataccctggtagtccatgccgtaaacgatgattactaggtgttgggggattgaccccctcagtgccgcagttaacacaataagtaatccacctggggagtacgaccgcaaggttgaaactcaaaggaattgacgggggcccgcacaagcagtggagtatgtggtttaattcgaagcaacgcgaagaaccttaccaggtcttgacatccgatgcatagcacagagatgtgtgaaatccttcgggacatcgagacaggtggtgcatggttgtcgtcagctcgtgtcgtgagatgttgggttaagtcccgcaacgagcgcaacccttattgccagttactacgttaagaggactctggcgagactgccgttgacaaaacggaggaaggtggggatgacgtcaaatcatcatgccctttatgacctgggctacacacgtactacaatggcgttaaacaaagagaagcaagaccgcgaggtggagcaaaactcaaaaacaacgtctcagttcagattgcaggctgcaactcgcctgcatgaagtcggaattgctagtaatcgcggatcagcatgccgcggtgaatacgttcccgggccttgtacacaccgcccgtcacaccatgagagccggggggacccgaagtcgatagtctaaccgcaaggaggacgtcgccgaaggtaaaactggtgattggggtgaagtcgtaacaaggtagccgtatcggaaggtgcggctggatcacctccttt

SEQ ID NO: 66 - DNA, 1264 bp, Artificial Sequence
  Holdemania_filiformis.GCF_000157995.GAIEDKPD_00018 16S ribosomal RNA (partial)
acctaggcgatgatacgtagccgacctgagagggtgaccggccacattgggactgagacacggcccaaactcctacgggaggcagcagtagggaattttcggcaatgggcgaaagcctgaccgagcaacgccgcgtgagtgaagaaggccttcgggttgtaaagctctgttgtgaaggaagaacggctcatacagggaatggtatgggagtgacggtactttaccagaaagccacggctaactacgtgccagcagccgcggtaatacgtaggtggcgagcgttatccggaattattgggcgtaaagggtgcgcaggcggtttgttaagtttaaggtgaaagcgtggggcttaaccccatatagccttagaaactgacagactagagtacaggagagggcaatggaattccatgtgtagcggtaaaatgcgtagatatatggaggaacaccagtggcgaaggcggttgcctggcctgtaactgacgctcatgcacgaaagcgtggggagcaaataggattagataccctagtagtccacgccgtaaacgatgagaactaagtgttggggaaactcagtgctgcagttaacgcaataagttctccgcctggggagtatgcacgcaagtgtgaaactcaaaggaattgacgggggcccgcacaagcggtggagtatgtggtttaattcgacgcaacgcgaagaaccttaccaggtcttgacatcccctgcaaagacatagagatatgttggaggttatcagggagacaggtggtgcatggttgtcgtcagctcgtgtcgtgagatgttgggttaagtcccgcaacgagcgcaacccttgtctttagttgctaacattaagttgaggactctagagagactgccggtgacaaaccggaggaaggtggggatgacgtcaaatcatcatgccccttatgacctgggctacacacgtactacaatggcggatacaacgagaagcaagacagtgatgtggagcaaaactcagaaagtccgtctcagttcggattgaagtctgcaacccgacttcatgaagccggaatcgctagtaatcgcggatcagcatgccgcggtgaatacgttctcgggccttgtacacaccgcccgtcaaaccatgagagttggcaatacccgaagccggtggcctaacctcgcaagaggagggagccgtcgaaggtagggctgatgattggggttaagtcgtaacaaggtatccctacgggaacgtggggatggatcacctccttt

SEQ ID NO: 67 - DNA, 1535 bp, Artificial Sequence
  Holdemania_sp_AP2.GCF_000327285.CMMLILNL_03489 16S ribosomal RNA
atggagagtttgatcctggctcaggatgaacgctggcggcgtgcctaatacatgcaagtcgaacgctttgtaaaggagcttgcttctttacgaggagtggcgaacgggtgagtaatacataagcaatctgcccatcggcctgggataacagttggaaacggctgctaataccggataggttagtttctggcatcagggactaattaaagttgggatacaacacggatggatgagcttatggcgtattagctagtaggtgaggtaacggcccacctaggcgatgatacgtagccgacctgagagggtgaccggccacattgggactgagacacggcccaaactcctacgggaggcagcagtagggaattttcggcaatgggcgaaagcctgaccgagcaacgccgcgtgagtgaagaaggccttcgggttgtaaagctctgttgtgaaggaagaacggctcatagagggaatgctatgggagtgacggtactttaccagaaagccacggctaactacgtgccagcagccgcggtaatacgtaggtggcgagcgttatccggaattattgggcgtaaagggtgcgcaggcggtttgaaaagtttaaggtgaaagcgtggggcttaaccccatacagccttagaaactgtcagactagagtacaggagagggcaatggaattccatgtgtagcggtaaaatgcgtagatatatggaggaacaccagtggcgaaggcggttgcctggcctgtaactgacgctcatgcacgaaagcgtggggagcaaataggattagataccctagtagtccacgccgtaaacgatgagaactaagtgttggggaaactcagtgctgcagttaacgcaataagttctccgcctggggagtatgcacgcaagtgtgaaactcaaaggaattgacgggggcccgcacaagcggtggagtatgtggtttaattcgacgcaacgcgaagaaccttaccaggtcttgacataccaggcaaagctatagagatatagtggaggttatcctggatacaggtggtgcatggttgtcgtcagctcgtgtcgtgagatgttgggttaagtcccgcaacgagcgcaacccttgtctttagttactaacattaagttgaggactctagagagactgccggtgacaaaccggaggaaggtggggatgacgtcaaatcatcatgccccttatgacctgggctacacacgtactacaatggcggatacaacgagaagcaagacagcaatgtggagcaaacctcagaaagtccgtctcagttcggattgaagtctgcaacccgacttcatgaagccggaatcgctagtaatcgcggatcagcatgccgcggtgaatacgttctcgggccttgtacacaccgcccgtcaaaccatgagagttggcaatacccgaagccggtggcctaaccctgcaaagggagggagccgtcgaaggtagggctgatgattggggttaagtcgtaacaaggtatccctacgggaacgtggggatggatcacctccttt

SEQ ID NO: 68 - DNA, 1537 bp, Artificial Sequence
  Parasutterella_excrementihominis.GCF_000205025.CEOCABBK_01117 16S ribosomal RNA
atagagtttgatcctggctcagattgaacgctggcggaacgctttacacatgcaagtcgaacggtaacgcggagagaagcttgcttctctccggcgacgagtggcgaacgggtgagtaatacatcggaacgtgtccgctcgtgggggacaaccagccgaaaggttggctaataccgcatgagttctacggaagaaagagggggacccgcaagggcctctcgcgagcggagcggccgatgactgattagcctgttggtgaggtaacggctcaccaaagcaacgatcagtagctggtctgagaggacgaccagccacactgggactgagacacggcccagactcctacgggaggcagcagtggggaattttggacaatgggcgcaagcctgatccagctattccgcgtgtgggatgaaggccctcgggttgtaaaccacttttgtagagaacgaaaagacaccttcgaataaagggtgttgctgacggtactctaagaataagcaccggctaactacgtgccagcagccgcggtaatacgtagggtgcgagcgttaatcggaattactgggcgtaaagggtgcgcaggcggttgagtaagacagatgtgaaatccccgagcttaactcgggaatggcatatgtgactgctcgactagagtgtgtcagagggaggtggaattccacgtgtagcagtgaaatgcgtagatatgtggaagaacaccgatggcgaaggcagcctcctgggacataactgacgctcaggcacgaaagcgtggggagcaaacaggattagataccctggtagtccacgccctaaacgatgttaactagttgttgggaagtaaaattctcagtaacgcagccaacgcgagaagttaaccgcctgggaagtacggtcgcaagactaaaactcaaaggaattgacggggacccgcacaagcggtggatgatgtggattaattcgatgcaacgcgaaaaaccttacctacccttgacatgtcaggaagctcttgtaatgagagcgtgcccgcaagggagcctgaacacaggtgctgcatggctgtcgtcagctcgtgtcgtgagatgttgggttaagtcccgcaacgagcgcaacccttgtcactagttgctacgaaagggcactctagtgagactgccggtgacaaaccggaggaaggtggggatgacgtcaagtcctcatggcccttatgggtagggcttcacacgtcatacaatggtcggaacagagggcagcgaagccgtgaggcggagccaatcccagaaaaccgatcgtagtccggattgcagtctgcaactcgactgcatgaagtcggaatcgctagtaatcgcggatcagcatgccgcggtgaatacgttcccgggtcttgtacacaccgcccgtcaaacaatgggagtggtgtttaccagaagtcgttagcctaaccgcaaggagggcggcgaccacggtgagcaccgtgactaatgttaagtcgtaacaaggtagccgtaccggaaggtgcggctggatcacctccttt

SEQ ID NO: 69 - DNA, 1221 bp, Artificial Sequence
  Prevotella_copri.GCF_000157935.POCBOFGG_01227 16S ribosomal RNA (partial)
atggagagtttgatcctggctcaggatgaacgctagctacaggcttaacacatgcaagtcgaggggaaacgatattggaagcttgcttccgataggcgtcgaccggcgcacgggtgagtaacgcgtatccaacctgcccatcacttggggataaccttgcgaaagtaagactaatacccaatgatatctctagaagacatctgaaagagattaaagatttatcggtgatggatggggatgcgtctgattagcttgttggcggggtaacggcccaccaaggcgacgatcagtaggggttctgagaggaaggtcccccacattggaactgagacacggtccaaactcctacgggaggcagcagtgaggaatattggtcaatggacgagagtctgaaccagccaagtagcgtgcaggaagacggccctatgggttgtaaactgcttttataagggaataaagtgagcctcgtgaggctttttgcatgtaccttatgaataaggaccggctaattccgtgccagcagccgcggtaatacggaaggtccgggcgttatccggatttattgggtttaaagggagcgtaggccggagattaagcgtgttgtgaaatgtagacgctcaacgtctgcactgcagcgcgaactggtttccttgagtacgcacaaagtgggcggaattcgtggtgtagcggtgaaatgcttagatatcacgaagaactccgattgcgaaggcagctcgctggagcgcaactgacgctgaagctcgaaagtgcgggtatcgaacaggattagataccctggtagtccgcacggtaaacgatggatgcccgctgttggtctgaacaggtcagcggccaagcgaaagcattaagcatcccacctggggagtacgccggcaacggtgaaactcaaaggaattgacgggggcccgcacaagcggaggaacatgtggtttaattcgatgatacgcgaggaaccttacccgggcttgaattgcagaggaagaatttggagacaatgacgcccttcgggccgtctgtgaaggtgctgcatggttgtcgtcagctcgtgccgtgaggtgtcggcttaagtgccataacgagcgcaacccctctccttagttgccatcaggttatgctgggcactctggggacactgccaccgtaaggtgtgaggaaggtggggatgacgtcaaatcagcacggcccttacgtccggggcta

SEQ ID NO: 70 - DNA, 1529 bp, Artificial Sequence
  Prevotella_copri.GCF_000157935.POCBOFGG_01492 16S ribosomal RNA
atggagagtttgatcctggctcaggatgaacgctagctacaggcttaacacatgcaagtcgaggggaaacgacatcgaaagcttgcttttgatgggcgtcgaccggcgcacgggtgagtaacgcgtatccaacctgcccaccacttggggataaccttgcgaaagtaagactaatacccaatgatatctctagaagacatctgaaagagattaaagatttatcggtgatggatggggatgcgtctgattagcttgttggcggggtaacggcccaccaaggcgacgatcagtaggggttctgagaggaaggtcccccacattggaactgagacacggtccaaactcctacgggaggcagcagtgaggaatattggtcaatgggcgagagcctgaaccagccaagtagcgtgcaggatgacggccctatgggttgtaaactgcttttataagggaataaagttagtctcgtgagactttttgcatgtaccttatgaataaggaccggctaattccgtgccagcagccgcggtaatacggaaggtccgggcgttatccggatttattgggtttaaagggagcgtaggccggagattaagcgtgttgtgaaatgtaggcgctcaacgtctgcactgcagcgcgaactggtttccttgagtacgcacaaagtgggtggaattcgtggtgtagcggtgaaatgcttagatatcacgaagaactccgattgcgaaggcagctcactggagcgcaactgacgctgaagctcgaaagtgcgggtatcgaacaggattagataccctggtagtccgcacggtaaacgatggatgcccgctgttggtctgaacaggtcagcggccaagcgaaagcattaagcatcccacctggggagtacgccggcaacggtgaaactcaaaggaattgacgggggcccgcacaagcggaggaacatgtggtttaattcgatgatacgcgaggaaccttacccgggcttgaattgcagaggaaggatttggagacaatgacgcccttcggggcctctgtgaaggtgctgcatggttgtcgtcagctcgtgccgtgaggtgtcggcttaagtgccataacgagcgcaacccctctccttagttgccatcaggttatgctgggcactctggggacactgccaccgtaaggtgtgaggaaggtggggatgacgtcaaatcagcacggcccttacgtccggggctacacacgtgttacaatggcaggtacagagagacggttgtacgtaagtacgatcaaatccttaaagcctgtctcagttcggattggggtctgcaacccgaccccacgaagctggattcgctagtaatcgcgcatcagccatggcgcggtgaatacgttcccgggccttgtacacaccgcccgtcaagccatgaaagccgggggcgcctaaagtccgtgaccgtaaggagcggcctagggcgaaactggtaattggggctaagtcgtaacaaggtagccgtaccggaaggtgcggctggaacacctccttt

SEQ ID NO: 71 - DNA, 1529 bp, Artificial Sequence
  Prevotella_copri.GCF_000157935.POCBOFGG_01527 16S ribosomal
atggagagtttgatcctggctcaggatgaacgctagctacaggcttaacacatgcaagtcgaggggaaacgacatcaaaagcttgcttttgatgggcgtcgaccggcgcacgggtgagtaacgcgtatccaacctgcccaccacttggggataaccttgcgaaagtaagactaatacccaatgatatctctagaagacatctgaaagagattaaagatttatcggtgatggatggggatgcgtctgattaccttgttggcggggtaacggcccaccaaggcgacgatcagtaggggttctgagaggaaggtcccccacattggaactgagacacggtccaaactcctacgggaggcagcagtgaggaatattggtcaatggacgagagtctgaaccagccaagtagcgtgcaggatgacggccctatgggttgtaaactgcttttataagggaataaagtgagcctcgtgaggctttttgcatgtaccttatgaataaggaccggctaattccgtgccagcagccgcggtaatacggaaggtccgggcgttatccggatttattgggtttaaagggagcgtaggccggagattaagcgtgttgtgaaatgtagacgctcaacgtctgcactgcagcgcgaactggtttccttgagtacgcacaaagtgggcggaattcgtggtgtagcggtgaaatgcttagatatcacgaagaactccgattgcgaaggcagctcactggagcgcaactgacgctgaagctcgaaagtgcgggtatcgaacaggattagataccctggtagtccgcacggtaaacgatggatgcccgctgttggtctgaacaggtcagcggccaagcgaaagcattaagcatcccacctggggagtacgccggcaacggtgaaactcaaaggaattgacgggggcccgcacaagcggaggaacatgtggtttaattcgatgatacgcgaggaaccttacccgggcttgaattgcagaggaaggatttggagacaatgacgcccttcggggcctctgtgaaggtgctgcatggttgtcgtcagctcgtgccgtgaggtgtcggcttaagtgccataacgagcgcaacccctctccttagttgccatcaggtcaagctgggcactctggggacactgccaccgtaaggtgtgaggaaggtggggatgacgtcaaatcagcacggcccttacgtccggggctacacacgtgttacaatggcaggtacagagagacggttgtacgtaagtacgatcaaatccttaaagcctgtctcagttcggactggggtctgcaacccgaccccacgaagctggattcgctagtaatcgcgcatcagccatggcgcggtgaatacgttcccgggccttgtacacaccgcccgtcaagccatgaaagccgggggcgcctaaagtccgtgaccgtaaggagcggcctagggcgaaactggtaattggggctaagtcgtaacaaggtagccgtaccggaaggtgcggctggaacacctccttt

SEQ ID NO: 72 - DNA, 1528 bp, Artificial Sequence
  Roseburia_hominis.GCF_000225345.MLGHKGPC_00026 16S ribosomal RNA
atgagagtttgatcctggctcaggatgaacgctggcggcgtgcttaacacatgcaagtcgaacgaagcactttaattgatttcttcggaatgaagtttttgtgactgagtggcggacgggtgagtaacgcgtgggtaacctgcctcatacagggggataacagttggaaacgactgctaataccgcataagcgcacaggattgcatgatccagtgtgaaaaactccggtggtatgagatggacccgcgtctgattagccagttggcggggtaacggcccaccaaagcgacgatcagtagccgacctgagagggtgaccggccacattgggactgagacacggcccaaactcctacgggaggcagcagtggggaatattgcacaatgggggaaaccctgatgcagcgacgccgcgtgagcgaagaagtatttcggtatgtaaagctctatcagcagggaagaagaatgacggtacctgactaagaagcaccggctaaatacgtgccagcagccgcggtaatacgtatggtgcaagcgttatccggatttactgggtgtaaagggagcgcaggcggtacggcaagtctgatgtgaaatcccggggctcaaccccggtactgcattggaaactgtcggactagagtgtcggaggggtaagtggaattcctagtgtagcggtgaaatgcgtagatattaggaggaacaccagtggcgaaggcggcttactggacgattactgacgctgaggctcgaaagcgtggggagcaaacaggattagataccctggtagtccacgccgtaaacgatgaatactaggtgtcggggagcattgctcttcggtgccgcagcaaacgcaataagtattccacctggggagtacgttcgcaagaatgaaactcaaaggaattgacggggacccgcacaagcggtggagcatgtggtttaattcgaagcaacgcgaagaaccttaccaagtcttgacatcccactgacaaagtatgtaatgtactttctcttcggagcagtggtgacaggtggtgcatggttgtcgtcagctcgtgtcgtgagatgttgggttaagtcccgcaacgagcgcaacccctattcttagtagccagcggttcggccgggcactctagggagactgccagggataacctggaggaaggtggggatgacgtcaaatcatcatgccccttatgacttgggctacacacgtgctacaatggcgtaaacaaagggaagcaatcccgcgagggggagcaaatctcaaaaataacgtctcagttcggactgtagtctgcaactcgactacacgaagctggaatcgctagtaatcgcgaatcagaatgtcgcggtgaatacgttcccgggtcttgtacacaccgcccgtcacaccatgggagttggtaatgcccgaagtcagtgacccaaccgcaaggagggagctgccgaaggcaggactgataactggggtgaagtcgtaacaaggtagccgtatcggaaggtgcggctggatcacctccttt

SEQ ID NO: 73 - DNA, 1528 bp, Artificial Sequence
  Roseburia_hominis.GCF_000225345.MLGHKGPC_00569 16S ribosomal RNA
atgagagtttgatcctggctcaggatgaacgctggcggcgtgcttaacacatgcaagtcgaacgaagcactttaattgatttcttcggaatgaagtttttgtgactgagtggcggacgggtgagtaacgcgtgggtaacctgcctcatacagggggataacagttggaaacgactgctaataccgcataagcgcacaggattgcatgatccagtgtgaaaaactccggtggtatgagatggacccgcgtctgattagccagttggcggggtaacggcccaccaaagcgacgatcagtagccgacctgagagggtgaccggccacattgggactgagacacggcccaaactcctacgggaggcagcagtggggaatattgcacaatgggggaaaccctgatgcagcgacgccgcgtgagcgaagaagtatttcggtatgtaaagctctatcagcagggaagaagaatgacggtacctgactaagaagcaccggctaaatacgtgccagcagccgcggtaatacgtatggtgcaagcgttatccggatttactgggtgtaaagggagcgcaggcggtacggcaagtctgatgtgaaatcccggggctcaaccccggtactgcattggaaactgtcggactagagtgtcggaggggtaagtggaattcctagtgtagcggtgaaatgcgtagatattaggaggaacaccagtggcgaaggcggcttactggacgattactgacgctgaggctcgaaagcgtggggagcaaacaggattagataccctggtagtccacgccgtaaacgatgaatactaggtgtcggggagcattgctcttcggtgccgcagcaaacgcaataagtattccacctggggagtacgttcgcaagaatgaaactcaaaggaattgacggggacccgcacaagcggtggagcatgtggtttaattcgaagcaacgcgaagaaccttaccaagtcttgacatcccactgacagagtatgtaatgtactttctcttcggagcagtggtgacaggtggtgcatggttgtcgtcagctcgtgtcgtgagatgttgggttaagtcccgcaacgagcgcaacccctattcttagtagccagcggttcggccgggcactctagggagactgccagggataacctggaggaaggtggggatgacgtcaaatcatcatgccccttatgacttgggctacacacgtgctacaatggcgtaaacaaagggaagcaatcccgcgagggggagcaaatctcaaaaataacgtctcagttcggactgtagtctgcaactcgactacacgaagctggaatcgctagtaatcgcgaatcagaatgtcgcggtgaatacgttcccgggtcttgtacacaccgcccgtcacaccatgggagttggtaatgcccgaagtcagtgacccaaccgcaaggagggagctgccgaaggcaggactgataactggggtgaagtcgtaacaaggtagccgtatcggaaggtgcggctggatcacctccttt

SEQ ID NO: 74 - DNA, 1528 bp, Artificial Sequence; identical to SEQ ID NO: 73
  Roseburia_hominis.GCF_000225345.MLGHKGPC_00947 16S ribosomal RNA

SEQ ID NO: 75 - DNA, 1528 bp, Artificial Sequence
  Roseburia_hominis.GCF_000225345.MLGHKGPC_02811 16S ribosomal RNA
atgagagtttgatcctggctcaggatgaacgctggcggcgtgcttaacacatgcaagtcgaacgaagcactttaattgatttcttcggaatgaagtttttgtgactgagtggcggacgggtgagtaacgcgtgggtaacctgcctcatacagggggataacagttggaaacgactgctaataccgcataagcgcacaggattgcatgatccggtgtgaaaaactccggtggtatgagatggacccgcgtctgattagccagttggcggggtaacggcccaccaaagcgacgatcagtagccgacctgagagggtgaccggccacattgggactgagacacggcccaaactcctacgggaggcagcagtggggaatattgcacaatgggggaaaccctgatgcagcgacgccgcgtgagcgaagaagtatttcggtatgtaaagctctatcagcagggaagaagaatgacggtacctgactaagaagcaccggctaaatacgtgccagcagccgcggtaatacgtatggtgcaagcgttatccggatttactgggtgtaaagggagcgcaggcggtacggcaagtctgatgtgaaatcccggggctcaaccccggtactgcattggaaactgtcggactagagtgtcggaggggtaagtggaattcctagtgtagcggtgaaatgcgtagatattaggaggaacaccagtggcgaaggcggcttactggacgattactgacgctgaggctcgaaagcgtggggagcaaacaggattagataccctggtagtccacgccgtaaacgatgaatactaggtgtcggggagcattgctcttcggtgccgcagcaaacgcaataagtattccacctggggagtacgttcgcaagaatgaaactcaaaggaattgacggggacccgcacaagcggtggagcatgtggtttaattcgaagcaacgcgaagaaccttaccaagtcttgacatcccactgacagagtatgtaatgtactttctcttcggagcagtggtgacaggtggtgcatggttgtcgtcagctcgtgtcgtgagatgttgggttaagtcccgcaacgagcgcaacccctattcttagtagccagcggttcggccgggcactctagggagactgccagggataacctggaggaaggtggggatgacgtcaaatcatcatgccccttatgacttgggctacacacgtgctacaatggcgtaaacaaagggaagcaatcccgcgagggggagcaaatctcaaaaataacgtctcagttcggactgtagtctgcaactcgactacacgaagctggaatcgctagtaatcgcgaatcagaatgtcgcggtgaatacgttcccgggtcttgtacacaccgcccgtcacaccatgggagttggtaatgcccgaagtcagtgacccaaccgcaaggagggagctgccgaaggcaggactgataactggggtgaagtcgtaacaaggtagccgtatcggaaggtgcggctggatcacctccttt

SEQ ID NO: 76 - DNA, 1531 bp, Artificial Sequence
  Roseburia_sp_CAG_45_SC195.GCA_900066395.DFLPCHGC_01805 16S ribosomal RNA
atgagagtttgatcctggctcaggatgaacgctggcggcgtgcttaacacatgcaagtcgaacgaagcactttattacgatttcttcggaatgacgatttagtgactgagtggcggacgggtgagtaacgcgtgggtaacctgccttatacagggggataacagttagaaatgactgctaataccgcataagcgcacaggattgcatgatctggtgtgaaaaactccggtggtataagatggacccgcgtctgattagctggttggtgaggtaacggcccaccaaggcgacgatcagtagccgacctgagagggtgaccggccacattgggactgagacacggcccaaactcctacgggaggcagcagtggggaatattgcacaatgggggaaaccctgatgcagcgacgccgcgtgagcgaagaagtatttcggtatgtaaagctctatcagcagggaagaaaaaaatgacggtacctgactaagaagccccggctaactacgtgccagcagccgcggtaatacgtagggggcaagcgttatccggatttactgggtgtaaagggagcgcaggcggtgcggcaagtctgatgtgaaagcccggggctcaaccccgggactgcattggaaactgtcgtacttgagtatcggagaggtaagtggaattcctagtgtagcggtgaaatgcgtagatattaggaggaacaccagtggcgaaggcggcttactggacgataactgacgctgaggctcgaaagcgtggggagcaaacaggattagataccctggtagtccacgccgtaaacgatgaatactaggtgtcgggggacatagtccttcggtgccgcagcaaacgcaataagtattccacctggggagtacgttcgcaagaatgaaactcaaaggaattgacggggacccgcacaagcggtggagcatgtggtttaattcgaagcaacgcgaagaaccttaccaagtcttgacatcccggtgacaaagtatgtaatgtactctttcttcggaacaccggtgacaggtggtgcatggttgtcgtcagctcgtgtcgtgagatgttgggttaagtcccgcaacgagcgcaacccctgttcttagtagccagcggttcggccgggcactctagggagactgccagggataacctggaggaaggcggggatgacgtcaaatcatcatgccccttatgacttgggctacacacgtgctacaatggcgtaaacaaagggaagcgaaaaggtgacttctagcaaatcccaaaaataacgtcccagttcggactgtagtctgcaactcgactacacgaagctggaatcgctagtaatcgcgaatcagaatgtcgcggtgaatacgttcccgggtcttgtacacaccgcccgtcacaccatgggagtcgggaatgcccgaagccggtgactcaaccgaaaggagagagccgtcgaaggcaggtctgataactggggtgaagtcgtaacaaggtagccgtatcggaaggtgcggctggatcacctccttt

SEQ ID NO: 77 - DNA, 1528 bp, Artificial Sequence
  Ruminococcus_gnavus.GCF_000507805.ONIFJNBG_02190 16S ribosomal RNA
aacgagagtttgatcctggctcaggatgaacgctggcggcgtgcttaacacatgcaagtcgagcgaagcacttttgcggatttcttcggattgaagcaattgtgactgagcggcggacgggtgagtaacgcgtgggtaacctgcctcatacagggggataacagttggaaacggctgctaataccgcataagcgcacagtaccgcatggtaccgtgtgaaaaactccggtggtatgagatggacccgcgtctgattagctagttggtggggtaacggcctaccaaggcgacgatcagtagccgacctgagagggtgaccggccacattgggactgagacacggcccaaactcctacgggaggcagcagtggggaatattgcacaatgggggaaaccctgatgcagcgacgccgcgtgagcgatgaagtatttcggtatgtaaagctctatcagcagggaagaaaatgacggtacctgactaagaagccccggctaactacgtgccagcagccgcggtaatacgtagggggcaagcgttatccggatttactgggtgtaaagggagcgtagacggcatggcaagccagatgtgaaagcccggggctcaaccccgggactgcatttggaactgtcaggctagagtgtcggagaggaaagcggaattcctagtgtagcggtgaaatgcgtagatattaggaggaacaccagtggcgaaggcggctttctggacgatgactgacgttgaggctcgaaagcgtggggagcaaacaggattagataccctggtagtccacgccgtaaacgatgaatactaggtgtcgggtggcaaagccattcggtgccgcagcaaacgcaataagtattccacctggggagtacgttcgcaagaatgaaactcaaaggaattgacggggacccgcacaagcggtggagcatgtggtttaattcgaagcaacgcgaagaaccttacctggtcttgacatccccctgaccgctctttaatcggagctttccttcgggacaggggagacaggtggtgcatggttgtcgtcagctcgtgtcgtgagatgttgggttaagtcccgcaacgagcgcaacccctatctttagtagccagcatttcggatgggcactctagagagactgccagggataacctggaggaaggtggggatgacgtcaaatcatcatgccccttatgaccagggctacacacgtgctacaatggcgtaaacaaagggaagcgagcccgcgagggggagcaaatcccaaaaataacgtctcagttcggattgtagtctgcaactcgactacatgaagctggaatcgctagtaatcgcgaatcagaatgtcgcggtgaatacgttcccgggtcttgtacacaccgcccgtcacaccatgggagtcagtaacgcccgaagtcagtgacccaaccgcaaggagggagctgccgaaggtgggaccgataactggggtgaagtcgtaacaaggtagccgtatcggaaggtgcggctggatcacctccttt

SEQ ID NO: 78 - DNA, 1528 bp, Artificial Sequence
  Ruminococcus_gnavus.GCF_000507805.ONIFJNBG_02411 16S ribosomal RNA
aacgagagtttgatcctggctcaggatgaacgctggcggcgtgcttaacacatgcaagtcgagcgaagcaccttgacggatttcttcggattgaagccttggtgactgagcggcggacgggtgagtaacgcgtgggtaacctgcctcatacagggggataacagttggaaacggctgctaataccgcataagcgcacagtaccgcatggtacggtgtgaaaaactccggtggtatgagatggacccgcgtctgattaggtagttggtggggtaacggcctaccaagccgacgatcagtagccgacctgagagggtgaccggccacattgggactgagacacggcccaaactcctacgggaggcagcagtggggaatattgcacaatgggggaaaccctgatgcagcgacgccgcgtgagcgatgaagtatttcggtatgtaaagctctatcagcagggaagaaaatgacggtacctgactaagaagccccggctaactacgtgccagcagccgcggtaatacgtagggggcaagcgttatccggatttactgggtgtaaagggagcgtagacggcatggcaagccagatgtgaaagcccggggctcaaccccgggactgcatttggaactgtcaggctagagtgtcggagaggaaagcggaattcctagtgtagcggtgaaatgcgtagatattaggaggaacaccagtggcgaaggcggctttctggacgatgactgacgttgaggctcgaaagcgtggggagcaaacaggattagataccctggtagtccacgccgtaaacgatgaatactaggtgtcgggtggcaaagccattcggtgccgcagcaaacgcaataagtattccacctggggagtacgttcgcaagaatgaaactcaaaggaattgacggggacccgcacaagcggtggagcatgtggtttaattcgaagcaacgcgaagaaccttacctggtcttgacatccctctgaccgctctttaatcggagctttccttcgggacagaggagacaggtggtgcatggttgtcgtcagctcgtgtcgtgagatgttgggttaagtcccgcaacgagcgcaacccctatctttagtagccagcattttggatgggcactctagagagactgccagggataacctggaggaaggtggggatgacgtcaaatcatcatgccccttatgatcagggctacacacgtgctacaatggcgtaaacaaagggaagcgagcccgcgagggggagcaaatcccaaaaataacgtctcagttcggattgtagtctgcaactcgactacatgaagctggaatcgctagtaatcgcgaatcagaatgtcgcggtgaatacgttcccgggtcttgtacacaccgcccgtcacaccatgggagtcagtaacgcccgaagtcagtgacccaaccgcaaggagggagctgccgaaggtgggaccgataactggggtgaagtcgtaacaaggtagccgtatcggaaggtgcggctggatcacctccttt

SEQ ID NO: 79 - DNA, 1528 bp, Artificial Sequence
  Ruminococcus_gnavus.GCF_000507805.ONIFJNBG_02808 16S ribosomal RNA
aacgagagtttgatcctggctcaggatgaacgctggcggcgtgcttaacacatgcaagtcgagcgaagcaccttgacggatttcttcggattgaagccttggtgactgagcggcggacgggtgagtaacgcgtgggtaacctgcctcatacagggggataacagttggaaacggctgctaataccgcataagcgcacagtaccgcatggtacggtgtgaaaaactccggtggtatgagatggacccgcgtctgattaggtagttggtggggtaacggcctaccaagccgacgatcagtagccgacctgagagggtgaccggccacattgggactgagacacggcccaaactcctacgggaggcagcagtggggaatattgcacaatgggggaaaccctgatgcagcgacgccgcgtgagcgatgaagtatttcggtatgtaaagctctatcagcagggaagaaaatgacggtacctgactaagaagccccggctaactacgtgccagcagccgcggtaatacgtagggggcaagcgttatccggatttactgggtgtaaagggagcgtagacggcatggcaagccagatgtgaaagcccggggctcaaccccgggactgcatttggaactgtcaggctagagtgtcggagaggaaagcggaattcctagtgtagcggtgaaatgcgtagatattaggaggaacaccagtggcgaaggcggctttctggacgatgactgacgttgaggctcgaaagcgtggggagcaaacaggattagataccctggtagtccacgccgtaaacgatgaatactaggtgtcgggtggcaaagccattcggtgccgcagcaaacgcaataagtattccacctggggagtacgttcgcaagaatgaaactcaaaggaattgacggggacccgcacaagcggtggagcatgtggtttaattcgaagcaacgcgaagaaccttacctggtcttgacatccccctgaccgctctttaatcggagctttccttcgggacagaggagacaggtggtgcatggttgtcgtcagctcgtgtcgtgagatgttgggttaagtcccgcaacgagcgcaacccctatctttagtagccagcattttggatgggcactctagagagactgccagggataacctggaggaaggtggggatgacgtcaaatcatcatgccccttatgatcagggctacacacgtgctacaatggcgtaaacaaagggaagcgagcccgcgagggggagcaaatcccaaaaataacgtctcagttcggattgtagtctgcaactcgactacatgaagctggaatcgctagtaatcgcgaatcagaatgtcgcggtgaatacgttcccgggtcttgtacacaccgcccgtcacaccatgggagtcagtaacgcccgaagtcagtgacccaaccgcaaggagggagctgccgaaggtgggaccgataactggggtgaagtcgtaacaaggtagccgtatcggaaggtgcggctggatcacctccttt

SEQ ID NO: 80 - DNA, 1242 bp, Artificial Sequence
  Ruminococcus_gnavus.GCF_000507805.ONIFJNBG_02871 16S ribosomal RNA (partial)
  misc_feature (1)..(1): n is a, c, g, or t
ncgacgatcagtagccgacctgagagggtgaccggccacattgggactgagacacggcccaaactcctacgggaggcagcagtggggaatattgcacaatgggggaaaccctgatgcagcgacgccgcgtgagcgatgaagtatttcggtatgtaaagctctatcagcagggaagaaaatgacggtacctgactaagaagccccggctaactacgtgccagcagccgcggtaatacgtagggggcaagcgttatccggatttactgggtgtaaagggagcgtagacggcatggcaagccagatgtgaaagcccggggctcaaccccgggactgcatttggaactgtcaggctagagtgtcggagaggaaagcggaattcctagtgtagcggtgaaatgcgtagatattaggaggaacaccagtggcgaaggcggctttctggacgatgactgacgttgaggctcgaaagcgtggggagcaaacaggattagataccctggtagtccacgccgtaaacgatgaatactaggtgtcgggtggcaaagccattcggtgccgcagcaaacgcaataagtattccacctggggagtacgttcgcaagaatgaaactcaaaggaattgacggggacccgcacaagcggtggagcatgtggtttaattcgaagcaacgcgaagaaccttacctggtcttgacatccctctgaccgctctttaatcggaactttccttcgggacagaggagacaggtggtgcatggttgtcgtcagctcgtgtcgtgagatgttgggttaagtcccgcaacgagcgcaacccctatctttagtagccagcattttggatgggcactctagagagactgccagggataacctggaggaaggtggggatgacgtcaaatcatcatgccccttatgaccagggctacacacgtgctacaatggcgtaaacaaagggaagcgagcccgcgagggggagcaaatcccaaaaataacgtctcagttcggattgtagtctgcaactcgactacatgaagctggaatcgctagtaatcgcgaatcagaatgtcgcggtgaatacgttcccgggtcttgtacacaccgcccgtcacaccatgggagtcagtaacgcccgaagtcagtgacccaaccgcaaggagggagctgccgaaggtgggaccgataactggggtgaagtcgtaacaaggtagccgtatcggaaggtgcggctggatcacctccttt

SEQ ID NO: 81 - DNA, 1528 bp, Artificial Sequence
  Ruminococcus_gnavus.GCF_000507805.ONIFJNBG_03037 16S ribosomal RNA
aacgagagtttgatcctggctcaggatgaacgctggcggcgtgcttaacacatgcaagtcgagcgaagcaccttgacggatttcttcggattgaagccttggtgactgagcggcggacgggtgagtaacgcgtgggtaacctgcctcatacagggggataacagttggaaacggctgctaataccgcataagcgcacagtaccgcatggtacggtgtgaaaaactccggtggtatgagatggacccgcgtctgattaggtagttggtggggtaacggcctaccaagccgacgatcagtagccgacctgagagggtgaccggccacattgggactgagacacggcccaaactcctacgggaggcagcagtggggaatattgcacaatgggggaaaccctgatgcagcgacgccgcgtgagcgatgaagtatttcggtatgtaaagctctatcagcagggaagaaaatgacggtacctgactaagaagccccggctaactacgtgccagcagccgcggtaatacgtagggggcaagcgttatccggatttactgggtgtaaagggagcgtagacggcatggcaagccagatgtgaaagcccggggctcaaccccgggactgcatttggaactgtcaggctagagtgtcggagaggaaagcggaattcctagtgtagcggtgaaatgcgtagatattaggaggaacaccagtggcgaaggcggctttctggacgatgactgacgttgaggctcgaaagcgtggggagcaaacaggattagataccctggtagtccacgccgtaaacgatgaatactaggtgtcgggtggcaaagccattcggtgccgcagcaaacgcaataagtattccacctggggagtacgttcgcaagaatgaaactcaaaggaattgacggggacccgcacaagcggtggagcatgtggtttaattcgaagcaacgcgaagaaccttacctggtcttgacatccctctgaccgctctttaatcggagctttccttcgggacagaggagacaggtggtgcatggttgtcgtcagctcgtgtcgtgagatgttgggttaagtcccgcaacgagcgcaacccctatctttagtagccagcatttcggatgggcactctagagagactgccagggataacctggaggaaggtggggatgacgtcaaatcatcatgccccttatgaccagggctacacacgtgctacaatggcgtaaacaaagggaagcgagcccgcgagggggagcaaatcccaaaaataacgtctcagttcggattgtagtctgcaactcgactacatgaagctggaatcgctagtaatcgcgaatcagaatgtcgcggtgaatacgttcccgggtcttgtacacaccgcccgtcacaccatgggagtcagtaacgcccgaagtcagtgacccaaccgcaaggagggagctgccgaaggtgggaccgataactggggtgaagtcgtaacaaggtagccgtatcggaaggtgcggctggatcacctccttt

SEQ ID NO: 82 - DNA, 1528 bp, Artificial Sequence
  Ruminococcus_gnavus_SC145.SPC11233.DDNHIDEK_02634 16S ribosomal RNA
aacgagagtttgatcctggctcaggatgaacgctggcggcgtgcttaacacatgcaagtcgagcgaagcgcttttgcggatttcttcggattgaagcaactgtgactgagcggcggacgggtgagtaacgcgtgggtaacctgcctcatacagggggataacagttggaaacggctgctaataccgcataagcgcacagtaccgcatggtaccgtgtgaaaaactccggtggtatgagatggacccgcgtctgattagctagttggtggggtaacggcctaccaaggcgacgatcagtagccgacctgagagggtgaccggccacattgggactgagacacggcccaaactcctacgggaggcagcagtggggaatattgcacaatgggggaaaccctgatgcagcgacgccgcgtgagcgatgaagtatttcggtatgtaaagctctatcagcagggaagaaaatgacggtacctgactaagaagccccggctaactacgtgccagcagccgcggtaatacgtagggggcaagcgttatccggatttactgggtgtaaagggagcgtagacggcatggcaagccagatgtgaaagcccggggctcaaccccgggactgcatttggaactgtcaggctagagtgtcggagaggtaagcggaattcctagtgtagcggtgaaatgcgtagatattaggaggaacaccagtggcgaaggcggcttactggacgatgactgacgttgaggctcgaaagcgtggggagcaaacaggattagataccctggtagtccacgccgtaaacgatgaatactaggtgtcgggtggcaaagccattcggtgccgcagcaaacgcaataagtattccacctggggagtacgttcgcaagaatgaaactcaaaggaattgacggggacccgcacaagcggtggagcatgtggtttaattcgaagcaacgcgaagaaccttacctggtcttgacatccctatgaccgctctttaatcggagctttccttcgggacagaggagacaggtggtgcatggttgtcgtcagctcgtgtcgtgagatgttgggttaagtcccgcaacgagcgcaacccctatctttagtagccagcattttggatgggcactctagagagactgccagggataacctggaggaaggtggggatgacgtcaaatcatcatgccccttatgaccagggctacacacgtgctacaatggcgtaaacaaagggaagcgaacctgcgagggggagcaaatcccaaaaataacgtctcagttcggattgtagtctgcaactcgactacatgaagctggaatcgctagtaatcgcgaatcagaatgtcgcggtgaatacgttcccgggtcttgtacacaccgcccgtcacaccatgggagtcagtaacgcccgaagtcagtgacccaaccgtaaggagggagctgccgaaggtgggaccgataactggggtgaagtcgtaacaaggtagccgtatcggaaggtgcggctggatcacctccttt

SEQ ID NO: 83 - DNA, 1528 bp, Artificial Sequence
  Ruminococcus_SC103.GCA_900066095.HKFAEPAM_02180 16S ribosomal RNA
tacgagagtttgatcctggctcaggatgaacgctggcggcgtgcttaacacatgcaagtcgaacgaagcacttaagtttgattcttcggatgaagacttttgtgactgagtggcggacgggtgagtaacgcgtgggtaacctgcctcatacagggggataacagttagaaatggctgctaataccgcataagaccacagcaccgcatggtgcaggggtaaaaactccggtggtatgagatggacccgcgtctgattagctggttggtggggtaacggcctaccaaggcgacgatcagtagccgacctgagagggtgaccggccacattgggactgagacacggcccaaactcctacgggaggcagcagtggggaatattgcacaatgggggaaaccctgatgcagcgacgccgcgtgaaggatgaagtatttcggtatgtaaacttctatcagcagggaagaaaatgacggtacctgactaagaagccccggctaactacgtgccagcagccgcggtaatacgtagggggcaagcgttatccggatttactgggtgtaaagggagcgtagacggtatggcaagtctgatgtgaaaggccagggctcaaccctgggactgcattggaaactgtcgaactagagtgtcggagaggcaagtggaattcctagtgtagcggtgaaatgcgtagatattaggaggaacaccagtggcgaaggcggcttgctggacgatgactgacgttgaggctcgaaagcgtggggagcaaacaggattagataccctggtagtccacgccgtaaacgatgactactaggtgtcgggtagcagagctattcggtgccgcagccaacgcaataagtagtccacctggggagtacgttcgcaagaatgaaactcaaaggaattgacggggacccgcacaagcggtggagcatgtggtttaattcgaagcaacgcgaagaaccttacctgctcttgacatctccctgaccggcaagtaatgttgcctttccttcgggacagggatgacaggtggtgcatggttgtcgtcagctcgtgtcgtgagatgttgggttaagtcccgcaacgagcgcaacccctatctttagtagccagcggtacggccgggcactctagagagactgccagggataacctggaggaaggtggggatgacgtcaaatcatcatgccccttatgagcagggctacacacgtgctacaatggcgtaaacaaagggaagcgagcctgcgagggtaagcaaatctcaaaaataacgtctcagttcggattgtagtctgcaactcgactacatgaagctggaatcgctagtaatcgcgaatcagaatgtcgcggtgaatacgttcccgggtcttgtacacaccgcccgtcacaccatgggagttggtaacgcccgaagtcagtgacccaaccgcaaggagggagctgccgaaggtgggaccgataactggggtgaagtcgtaacaaggtagccgtatcggaaggtgcggctggatcacctccttt

SEQ ID NO: 84 - DNA, 1560 bp, Artificial Sequence
  Veillonella_atypica.GCF_000179755.LBHEMEMC_00479 16S ribosomal RNA
ttggagagtttgatcctggctcaggacgaacgctggcggcgtgcttaacacatgcaagtcgaacgaagagcgatggaagcttgcttctatcaatcttagtggcgaacgggtgagtaacgcgtaatcaacctgcccttcagagggggacaacagttggaaacgactgctaataccgcatacgatccaatctcggcatcgagactggatgaaaggtggcctctatttataagctatcactgaaggaggggattgcgtctgattagctagttggaggggtaacggcccaccaaggcgatgatcagtagccggtctgagaggatgaacggccacattgggactgagacacggcccagactcctacgggaggcagcagtggggaatcttccgcaatggacgaaagtctgacggagcaacgccgcgtgagtgatgacggccttcgggttgtaaagctctgttaatcgggacgaatggttcttgtgcgaatagtgcgaggatttgacggtaccggaatagaaagccacggctaactacgtgccagcagccgcggtaatacgtaggtggcaagcgttgtccggaattattgggcgtaaagcgcgcgcaggcggattagttagtctgtcttaaaagttcggggcttaaccccgtgatgggatggaaactgctgatctagagtatcggagaggaaagtggaattcctagtgtagcggtgaaatgcgtagatattaggaagaacaccagtggcgaaggcgactttctggacgaaaactgacgctgaggcgcgaaagccaggggagcgaacgggattagataccccggtagtcctggccgtaaacgatgggtactaggtgtaggaggtatcgaccccttctgtgccggagttaacgcaataagtaccccgcctggggagtacgaccgcaaggttgaaactcaaaggaattgacgggggcccgcacaagcggtggagtatgtggtttaattcgacgcaacgcgaagaaccttaccaggtcttgacattgatggacagaactagagatagttcctcttcttcggaagccagaaaacaggtggtgcacggttgtcgtcagctcgtgtcgtgagatgttgggttaagtcccgcaacgagcgcaacccctatcttatgttgccagcacttcgggtgggaactcatgagagactgccgcagacaatgcggaggaaggcggggatgacgtcaaatcatcatgccccttatgacctgggctacacacgtactacaatgggagttaatagacggaagcgaaaccgcgaggtggagcaaacccgagaaacactctctcagttcggatcgtaggctgcaactcgcctacgtgaagtcggaatcgctagtaatcgcaggtcagcatactgcggtgaatacgttcccgggccttgtacacaccgcccgtcacaccacgaaagtcggaagtgcccaaagccggtggggtaaccttcgggagccagccgtctaaggtaaagtcgatgattggggtgaagtcgtaacaaggtagccgtatcggaaggtgcggctggatcacctccttt

SEQ ID NO: 85 - DNA, 1560 bp, Artificial Sequence
  Veillonella_dispar.GCF_000160015.BDENPNGG_00523 16S ribosomal RNA
ttggagagtttgatcctggctcaggacgaacgctggcggcgtgcttaacacatgcaagtcgaacgaagagcgatggaagcttgcttctatcaatcttagtggcgaacgggtgagtaacgcgtaatcaacctgcccttcagagggggacaacagttggaaacgactgctaataccgcatacgatctaacctcggcatcgaggatagatgaaaggtggcctctatttataagctatcactgaaggaggggattgcgtctgattagctagttggaggggtaacggcccaccaaggcgatgatcagtagccggtctgagaggatgaacggccacattgggactgagacacggcccagactcctacgggaggcagcagtggggaatcttccgcaatggacgaaagtctgacggagcaacgccgcgtgagtgatgacggccttcgggttgtaaagctctgttaatcgggacgaaaggccttcttgcgaatagttagaaggattgacggtaccggaatagaaagccacggctaactacgtgccagcagccgcggtaatacgtaggtggcaagcgttgtccggaattattgggcgtaaagcgcgcgcaggcggattggtcagtctgtcttaaaagttcggggcttaaccccgtgatgggatggaaactgccaatctagagtatcggagaggaaagtggaattcctagtgtagcggtgaaatgcgtagatattaggaagaacaccagtggcgaaggcgactttctggacgaaaactgacgctgaggcgcgaaagccaggggagcgaacgggattagataccccggtagtcctggccgtaaacgatgggtactaggtgtaggaggtatcgaccccttctgtgccggagttaacgcaataagtaccccgcctggggagtacgaccgcaaggttgaaactcaaaggaattgacgggggcccgcacaagcggtggagtatgtggtttaattcgacgcaacgcgaagaaccttaccaggtcttgacattgatggacagaactagagatagttcctcttcttcggaagccagaaaacaggtggtgcacggttgtcgtcagctcgtgtcgtgagatgttgggttaagtcccgcaacgagcgcaacccctatcttatgttgccagcactttgggtgggaactcatgagagactgccgcagacaatgcggaggaaggcggggatgacgtcaaatcatcatgccccttatgacctgggctacacacgtactacaatgggagttaatagacggaagcaataccgcgaggtggagcaaacccgagaaacactctctcagttcggatcgtaggctgcaactcgcctacgtgaagtcggaatcgctagtaatcgcaggtcagcatactgcggtgaatacgttcccgggccttgtacacaccgcccgtcacaccacgaaagtcggaagtgcccaaagccggtggggtaaccttcgggagccagccgtctaaggtaaagtcgatgattggggtgaagtcgtaacaaggtagccgtatcggaaggtgcggctggattacctccttt

SEQ ID NO: 86 - DNA, 1560 bp, Artificial Sequence
  Veillonella_dispar.GCF_000160015.BDENPNGG_01115 16S ribosomal RNA
ttggagagtttgatcctggctcaggacgaacgctggcggcgtgcttaacacatgcaagtcgaacgaagagcgatggaagcttgcttctatcaatcttagtggcgaacgggtgagtaacgcgtaatcaacctgcccttcagagggggacaacagttggaaacgactgctaataccgcatacgatctaacctcggcatcgaggatagatgaaaggtggcctctatttataagctatcactgaaggaggggattgcgtctgattagctagttggaggggtaacggcccaccaaggcgatgatcagtagccggtctgagaggatgaacggccacattgggactgagacacggcccagactcctacgggaggcagcagtggggaatcttccgcaatggacgaaagtctgacggagcaacgccgcgtgagtgatgacggccttcgggttgtaaagctctgttaatcgggacgaaaggccttcttgcgaatagttagaaggattgacggtaccggaatagaaagccacggctaactacgtgccagcagccgcggtaatacgtaggtggcaagcgttgtccggaattattgggcgtaaagcgcgcgcaggcggattggtcagtctgtcttaaaagttcggggcttaaccccgtgatgggatggaaactgccaatctagagtatcggagaggaaagtggaattcctagtgtagcggtgaaatgcgtagatattaggaagaacaccagtggcgaaggcgactttctggacgaaaactgacgctgaggcgcgaaagccaggggagcgaacgggattagataccccggtagtcctggccgtaaacgatgggtactaggtgtaggaggtatcgaccccttctgtgccggagttaacgcaataagtaccccgcctggggagtacgaccgcaaggttgaaactcaaaggaattgacgggggcccgcacaagcggtggagtatgtggtttaattcgacgcaacgcgaagaaccttaccaggtcttgacattgatggacagaactagagatagttcctcttcttcggaagccagaaaacaggtggtgcacggttgtcgtcagctcgtgtcgtgagatgttgggttaagtcccgcaacgagcgcaacccctatcttatgttgccagcactttgggtgggaactcatgagagactgccgcagacaatgcggaggaaggcggggatgacgtcaaatcatcatgccccttatgacctgggctacacacgtactacaatgggagttaatagacggaagcaataccgcgaggtggagcaaacccgagaaacactctctcagttcggatcgtaggctgcaactcgcctacgtgaagtcggaatcgctagtaatcgcaggtcagcatactgcggtgaatacgttcccgggccttgtacacaccgcccgtcacaccacgaaagtcggaagtgcccaaagccggtggggtaaccttcgggagccagccgtctaaggtaaagtcgatgattggggtgaagtcgtaacaaggtagccgtatcggaaggtgcggctggatcacctccttt

SEQ ID NO: 87 - DNA, 1561 bp, Artificial Sequence
  Veillonella_parvula.GCF_000215025.NBPOCHED_00439 16S ribosomal RNA
ttggagagtttgatcctggctcaggacgaacgctggcggcgtgcttaacacatgcaagtcgaacgaagagcgatggaagcttgcttctatcaatcttagtggcgaacgggtgagtaacgcgtaatcaacctgcccttcagagggggacaacagttggaaacgactgctaataccgcatacgatctaatctcggcatcgaggatagatgaaaggtggcctctacatgtaagctatcactgaaggaggggattgcgtctgattagctagttggaggggtaacggcccaccaaggcgatgatcagtagccggtctgagaggatgaacggccacattgggactgagacacggcccagactcctacgggaggcagcagtggggaatcttccgcaatggacgaaagtctgacggagcaacgccgcgtgagtgatgacggccttcgggttgtaaagctctgttaatcgggacgaaaggccttcttgcgaacagttagaaggattgacggtaccggaatagaaagccacggctaactacgtgccagcagccgcggtaatacgtaggtggcaagcgttgtccggaattattgggcgtaaagcgcgcgcaggcggatcagtcagtctgtcttaaaagttcggggcttaaccccgtgatgggatggaaactgctgatctagagtatcggagaggaaagtggaattcctagtgtagcggtgaaatgcgtagatattaggaagaacaccagtggcgaaggcgactttctggacgaaaactgacgctgaggcgcgaaagccaggggagcgaacgggattagataccccggtagtcctggccgtaaacgatgggtactaggtgtaggaggtatcgaccccttctgtgccggagttaacgcaataagtaccccgcctggggagtacgaccgcaaggttgaaactcaaaggaattgacgggggcccgcacaagcggtggagtatgtggtttaattcgacgcaacgcgaagaaccttaccaggtcttgacattgatggacagaactagagatagttcctcttcttcggaagccagaaaacaggtggtgcacggttgtcgtcagctcgtgtcgtgagatgttgggttaagtcccgcaacgagcgcaacccctatcttatgttgccagcacgtaatggtgggaactcatgagagactgccgcagacaatgcggaggaaggcggggatgacgtcaaatcatcatgccccttatgacctgggctacacacgtactacaatgggagttaatagacggaagcgagatcgcgagatggagcaaacccgagaaacactctctcagttcggatcgtaggctgcaactcgcctacgtgaagtcggaatcgctagtaatcgcaggtcagcatactgcggtgaatacgttcccgggccttgtacacaccgcccgtcacaccacgaaagtcggaagtgcccaaagccggtggggtaaccttcgggagccagccgtctaaggtaaagtcgatgattggggtgaagtcgtaacaaggtagccgtatcggaaggtgcggctggatcacctccttt

SEQ ID NO: 88 - DNA, 1560 bp, Artificial Sequence
  Veillonella_ratti.GCF_000315505.DOIPMBPC_01633 16S ribosomal RNA
ttggagagtttgatcctggctcaggacgaacgctggcggcgtgcttaacacatgcaagtcgaacggagagagatggaagcttgcttctatcaatcttagtggcgaacgggtgagtaacgcgtaaccaacctgcccttcagagggggataacaacgggaaaccgttgctaataccgcgtacgaatgaacttcggcatcggagctcattgaaaggtggcctctatttataagctatcgctgaaggagggggttgcgtctgattagctagttggaggggtaacggcccaccaaggcaatgatcagtagccggtctgagaggatgaacggccacattgggactgagacacggcccaaactcctacgggaggcagcagtggggaatcttccgcaatggacgaaagtctgacggagcaacgccgcgtgagtgatgacggccttcgggttgtaaagctctgttaatcgggacgaatggtctttgtgtgaataatgcaaagatttgacggtaccggaatagaaagccacggctaactacgtgccagcagccgcggtaatacgtaggtggcaagcgttgtccggaattattgggcgtaaagcgcgcgcaggcggtttcataagtctgtcttaaaagtgcggggcttaaccccgtgaggggatggaaactatggaactggagtatcggagaggaaagcggaattcctagtgtagcggtgaaatgcgtagatattaggaagaacaccagtggcgaaggcggctttctggacgacaactgacgctgaggcgcgaaagccaggggagcgaacgggattagataccccggtagtcctggccgtaaacgatgggtactaggtgtaggaggtatcgaccccttctgtgccggagttaacgcaataagtaccccgcctggggagtacggtcgcaaggctgaaactcaaaggaattgacgggggcccgcacaagcggtggagtatgtggtttaattcgacgcaacgcgaagaaccttaccaggtcttgacattgatggacgaaacaagagattgtttttctccttcgggagccagaaaacaggtggtgcacggctgtcgtcagctcgtgtcgtgagatgttgggttaagtcccgcaacgagcgcaacccctatcttatgttgccagcacttcgggtgggaactcatgagagactgccgcagacaatgcggaggaaggcggggatgacgtcaagtcatcatgccccttatgacctgggctacacacgtactacaatgggctttaatagagggaagcgaaaccgcgaggtggagcaaaccccagaaacaagctctcagttcggatcgtaggctgcaactcgcctacgtgaagtcggaatcgctagtaatcgcaggtcagcatactgcggtgaatacgttcccgggccttgtacacaccgcccgtcacaccacgaaagtcggaagtacccaaagccggtggggtaaccttcgggagccagccgtctaaggtaaagtcgatgattggggtgaagtcgtaacaaggtagccgtatcggaaggtgcggctggatcacctccttt

SEQ ID NO: 89 - DNA, 1562 bp, Artificial Sequence
  Veillonella_sp_3_1_44.GCF_000163715.NFDDHLDP_00010 16S ribosomal RNA
ttggagagtttgatcctggctcaggacgaacgctggcggcgtgcttaacacatgcaagtcgaacgaagagcgatggaagcttgcttctatcaatcttagtggcgaacgggtgagtaacgcgtaatcaacctgcccttcagagggggacaacagttggaaacgactgctaataccgcatacgatctaatctcggcatcgaggatagatgaaaggtggcctctacatgtaagctatcactgaaggaggggattgcgtctgattagctagttggaggggtaacggcccaccaaggcgatgatcagtagccggtctgagaggatgaacggccacattgggactgagacacggcccagactcctacgggaggcagcagtggggaatcttccgcaatggacgaaagtctgacggagcaacgccgcgtgagtgatgacggccttcgggttgtaaagctctgttaatcgggacgaaaggccttcttgcgaatagtgagaaggattgacggtaccggaatagaaagccacggctaactacgtgccagcagccgcggtaatacgtaggtggcaagcgttgtccggaattattgggcgtaaagcgcgcgcaggcggataggtcagtctgtcttaaaagttcggggcttaaccccgtgatgggatggaaactgccaatctagagtatcggagaggaaagtggaattcctagtgtagcggtgaaatgcgtagatattaggaagaacaccagtggcgaaggcgactttctggacgaaaactgacgctgaggcgcgaaagccaggggagcgaacgggattagataccccggtagtcctggccgtaaacgatgggtactaggtgtaggaggtatcgaccccttctgtgccggagttaacgcaataagtaccccgcctggggagtacgaccgcaaggttgaaactcaaaggaattgacgggggcccgcacaagcggtggagtatgtggtttaattcgacgcaacgcgaagaaccttaccaggtcttgacattgatggacagaaccagagatggttcctcttcttcggaagccagaaaacaggtggtgcacggttgtcgtcagctcgtgtcgtgagatgttgggttaagtcccgcaacgagcgcaacccctatcttatgttgccagcacgtaaaggtggggaactcatgagagactgccgcagacaatgcggaggaaggcggggatgacgtcaaatcatcatgccccttatgacctgggctacacacgtactacaatgggagttaatagacggaagcgagatcgcgagatggagcaaacccgagaaacactctctcagttcggatcgtaggctgcaactcgcctacgtgaagtcggaatcgctagtaatcgcaggtcagcatactgcggtgaatacgttcccgggccttgtacacaccgcccgtcacaccacgaaagtcggaagtgcccaaagccggtggggtaaccttcgggagccagccgtctaaggtaaagtcgatgattggggtgaagtcgtaacaaggtagccgtatcggaaggtgcggctggatcacctccttt

SEQ ID NO: 90 - DNA, 1560 bp, Artificial Sequence
  Veillonella_sp_6_1_27.GCF_000163735.LEKPOLAK_00006 16S ribosomal RNA
ttggagagtttgatcctggctcaggacgaacgctggcggcgtgcttaacacatgcaagtcgaacgaagagcgatggaagcttgcttctatcaatcttagtggcgaacgggtgagtaacgcgtaatcaacctgcccttcagagggggacaacagttggaaacgactgctaataccgcatacgatctaatctcggcatcgaggatagatgaaaggtggcctctacatgtaagctatcactgaaggaggggattgcgtctgattagctagttggaggggtaacggcccaccaaggcgatgatcagtagccggtctgagaggatgaacggccacattgggactgagacacggcccagactcctacgggaggcagcagtggggaatcttccgcaatggacgaaagtctgacggagcaacgccgcgtgagtgatgacggccttcgggttgtaaagctctgttaatcgggacgaaaggccttcttgcgaatagtgagaaggattgacggtaccggaatagaaagccacggctaactacgtgccagcagccgcggtaatacgtaggtggcaagcgttgtccggaattattgggcgtaaagcgcgcgcaggcggatcagtcagtctgtcttaaaagttcggggcttaaccccgtgatgggatggaaactgctgatctagagtatcggagaggaaagtggaattcctagtgtagcggtgaaatgcgtagatattaggaagaacaccagtggcgaaggcgactttctggacgaaaactgacgctgaggcgcgaaagccaggggagcgaacgggattagataccccggtagtcctggccgtaaacgatgggtactaggtgtaggaggtatcgaccccttctgtgccggagttaacgcaataagtaccccgcctggggagtacgaccgcaaggttgaaactcaaaggaattgacgggggcccgcacaagcggtggagtatgtggtttaattcgacgcaacgcgaagaaccttaccaggtcttgacattgatggacagaaccagagatggttcctcttcttcggaagccagaaaacaggtggtgcacggttgtcgtcagctcgtgtcgtgagatgttgggttaagtcccgcaacgagcgcaacccctatcttatgttgccagcactttgggtggggactcatgagagactgccgcagacaatgcggaggaaggcggggatgacgtcaaatcatcatgccccttatgacctgggctacacacgtactacaatgggagttaatagacggaagcgagatcgcgagatggagcaaacccgagaaacactctctcagttcggatcgtaggctgcaactcgcctacgtgaagtcggaatcgctagtaatcgcaggtcagcatactgcggtgaatacgttcccgggccttgtacacaccgcccgtcacaccacgaaagtcggaagtgcccaaagccggtggggtaaccttcgggagccagccgtctaaggtaaagtcgatgattggggtgaagtcgtaacaaggtagccgtatcggaaggtgcggctggatcacctccttt

SEQ ID NO: 91 - DNA, 1560 bp, Artificial Sequence
  Veillonella_sp_HPA0037.GCF_000411535.CBIHEBNK_00803 16S ribosomal RNA
ttggagagtttgatcctggctcaggacgaacgctggcggcgtgcttaacacatgcaagtcgaacgaagaacgatggaagcttgcttctatcaatcttagtggcgaacgggtgagtaacgcgtaatcaacctgcccttcagagggggacaacagttggaaacgactgctaataccgcatacgatccaatctcggcatcgagactggatgaaaggtggcctctatttataagctatcactgaaggaggggattgcgtctgattagctagttggaggggtaacggcccaccaaggcgatgatcagtagccggtctgagaggatgaacggccacattgggactgagacacggcccagactcctacgggaggcagcagtggggaatcttccgcaatggacgaaagtctgacggagcaacgccgcgtgagtgatgacggccttcgggttgtaaagctctgttaatcgggacgaatggttcttgtgcaaatagtgcgaggatttgacggtaccggaatagaaagccacggctaactacgtgccagcagccgcggtaatacgtaggtggcaagcgttgtccggaattattgggcgtaaagcgcgcgcaggcggattggtcagtctgtcttaaaagttcggggcttaaccccgtgatgggatggaaactgccaatctagagtatcggagaggaaagtggaattcctagtgtagcggtgaaatgcgtagatattaggaagaacaccagtggcgaaggcgactttctggacgaaaactgacgctgaggcgcgaaagccaggggagcgaacgggattagataccccggtagtcctggccgtaaacgatgggtactaggtgtaggaggtatcgaccccttctgtgccggagttaacgcaataagtaccccgcctggggagtacgaccgcaaggttgaaactcaaaggaattgacgggggcccgcacaagcggtggagtatgtggtttaattcgacgcaacgcgaagaaccttaccaggtcttgacattgatggacagaactagagatagttcctcttcttcggaagccagaaaacaggtggtgcacggttgtcgtcagctcgtgtcgtgagatgttgggttaagtcccgcaacgagcgcaacccctatcttatgttgccagcacttcgggtgggaactcatgagagactgccgcagacaatgcggaggaaggcggggatgacgtcaaatcatcatgccccttatgacctgggctacacacgtactacaatgggagttaatagacggaagcgaaaccgcgaggtggagcaaacccgagaaacactctctcagttcggatcgtaggctgcaactcgcctacgtgaagtcggaatcgctagtaatcgcaggtcagcatactgcggtgaatacgttcccgggccttgtacacaccgcccgtcacaccacgaaagtcggaagtgcccaaagccggtggggtaaccttcgggagccagccgtctaaggtaaagtcgatgattggggtgaagtcgtaacaaggtagccgtatcggaaggtgcggctggatcacctccttt

SEQ ID NO: 92 - DNA, 1560 bp, Artificial Sequence
  Veillonella_sp_HPA0037.GCF_000411535.CBIHEBNK_01213 16S ribosomal RNA
ttggagagtttgatcctggctcaggacgaacgctggcggcgtgcttaacacatgcaagtcgaacgaagagcgatggaagcttgcttctatcaatcttagtggcgaacgggtgagtaacgcgtaatcaacctgcccttcagagggggacaacagttggaaacgactgctaataccgcatacgatccaatctcggcatcgagactggatgaaaggtggcctctatttataagctatcactgaaggaggggattgcgtctgattagctagttggaggggtaacggcccaccaaggcgatgatcagtagccggtctgagaggatgaacggccacattgggactgagacacggcccagactcctacgggaggcagcagtggggaatcttccgcaatggacgaaagtctgacggagcaacgccgcgtgagtgatgacggccttcgggttgtaaagctctgttaatcgggacgaatggttcttgtgcaaatagtgcgaggatttgacggtaccggaatagaaagccacggctaactacgtgccagcagccgcggtaatacgtaggtggcaagcgttgtccggaattattgggcgtaaagcgcgcgcaggcggattggtcagtctgtcttaaaagttcggggcttaaccccgtgatgggatggaaactgccaatctagagtatcggagaggaaagtggaattcctagtgtagcggtgaaatgcgtagatattaggaagaacaccagtggcgaaggcgactttctggacgaaaactgacgctgaggcgcgaaagccaggggagcgaacgggattagataccccggtagtcctggccgtaaacgatgggtactaggtgtaggaggtatcgaccccttctgtgccggagttaacgcaataagtaccccgcctggggagtacgaccgcaaggttgaaactcaaaggaattgacgggggcccgcacaagcggtggagtatgtggtttaattcgacgcaacgcgaagaaccttaccaggtcttgacattgatggacagaaccagagatggttcctcttcttcggaagccagaaaacaggtggtgcacggttgtcgtcagctcgtgtcgtgagatgttgggttaagtcccgcaacgagcgcaacccctatcttatgttgccagcacttcgggtgggaactcatgagagactgccgcagacaatgcggaggaaggcggggatgacgtcaaatcatcatgccccttatgacctgggctacacacgtactacaatgggagttaatagacggaagcgaaaccgcgaggtggagcaaacccgagaaacactctctcagttcggatcgtaggctgcaactcgcctacgtgaagtcggaatcgctagtaatcgcaggtcagcatactgcggtgaatacgttcccgggccttgtacacaccgcccgtcacaccacgaaagtcggaagtgcccaaagccggtggggtaaccttcgggagccagccgtctaaggtaaagtcgatgattggggtgaagtcgtaacaaggtagccgtatcggaaggtgtggctggatcacctccttt

SEQ ID NO: 93 - DNA, 1560 bp, Artificial Sequence
  Veillonella_sp_HPA0037.GCF_000411535.CBIHEBNK_01774 16S ribosomal RNA
ttggagagtttgatcctggctcaggacgaacgctggcggcgtgcttaacacatgcaagtcgaacgaagagcgatggaagcttgcttctatcaatcttagtggcgaacgggtgagtaacgcgtaatcaacctacccttcagagggggacaacagttggaaacgactgctaataccgcatacgatccaatctcggcatcgagactggatgaaaggtggcctctatttataagctatcactgaaggaggggattgcgtctgattagctagttggaggggtaacggcccaccaaggcgatgatcagtagccggtctgagaggatgaacggccacattgggactgagacacggcccagactcctacgggaggcagcagtggggaatattccgcaatggacgaaagtctgacggagcaacgccgcgtgagtgatgacggccttcgggttgtaaagctctgttaatcgggacgaatggttcttgtgcgaatagtgcgaggatttgacggtaccggaatagaaagccacggctaactacgtgccagcagccgcggtaatacgtaggtggcaagcgttgtccggaattattgggcgtaaagcgcgcgcaggcggattggtcagtctgtcttaaaagttcggggcttaaccccgtgatgggatggaaactgccaatctagagtatcggagaggaaagtggaattcctagtgtagcggtgaaatgcgtagatattaggaagaacaccagtggcgaaggcgactttctggacgaaaactgacgctgaggcgcgaaagccaggggagcgaacgggattagataccccggtagtcctggccgtaaacgatgggtactaggtgtaggaggtatcgaccccttctgtgccggagttaacgcaataagtaccccgcctggggagtacgaccgcaaggttgaaactcaaaggaattgacgggggcccgcacaagcggtggagtatgtggtttaattcgacgcaacgcgaagaaccttaccaggtcttgacattgatggacagaaccagagatggttcctcttcttcggaagccagaaaacaggtggtgcacggttgtcgtcagctcgtgtcgtgagatgttgggttaagtcccgcaacgagcgcaacccctatcttatgttgccagcacttcgggtgggaactcatgagagactgccgcagacaatgcggaggaaggcggggatgacgtcaaatcatcatgccccttatgacctgggctacacacgtactacaatgggagttaatagacggaagcgaaaccgcgaggtggagcaaacccgagaaacactctctcagttcggatcgtaggctgcaactcgcctacgtgaagtcggaatcgctagtaatcgcaggtcagcatactgcggtgaatacgttcccgggccttgtacacaccgcccgtcacaccacgaaagtcggaagtgcccaaagccggtggggtaaccttcgggagccagccgtctaaggtaaagtcgatgattggggtgaagtcgtaacaaggtagccgtatcggaaggtgcggctggatcacctccttt

SEQ ID NO: 94 - DNA, 885 bp, Artificial Sequence
  Veillonella_sp_oral_taxon_158.GCF_000183505.MDJKJNHE_00001 16S ribosomal RNA (partial)
ttggagagtttgatcctggctcaggacgaacgctggcggcgtgcttaacacatgcaagtcgaacgaagagcgatggaagcttgcttctatcaatcttagtggcgaacgggtgagtaacgcgtaatcaacctgcccttcagagggggacaacagttggaaacgactgctaataccgcatacgatccaatctcggcatcgaggatggatgaaaggtggcctctatttataagctatcactgaaggaggggattgcgtctgattagctagttggaggggtaacggcccaccaaggcaatgatcagtagccggtctgagaggatgaacggccacattgggactgagacacggcccagactcctacgggaggcagcagtggggaatcttccgcaatggacgaaagtctgacggagcaacgccgcgtgagtgatgacggccttcgggttgtaaagctctgttaatcgggacgaaaggtcttcttgcgaatagttagaagaattgacggtaccggaatagaaagccacggctaactacgtgccagcagccgcggtaatacgtaggtggcaagcgttgtccggaattattgggcgtaaagcgcgcgcaggcggatcagttagtctgtcttaaaagttcggggcttaaccccgtgatgggatggaaactgctgatctagagtatcggagaggaaagtggaattcctagtgtagcggtgaaatgcgtagatattaggaagaacaccagtggcgaaggcgactttctggacgaaaactgacgctgaggcgcgaaagccaggggagcgaacgggattagataccccggtagtcctggccgtaaacgatgggtactaggtgtaggaggtatcgaccccttctgtgccggagttaacgc

SEQ ID NO: 95 - DNA, 884 bp, Artificial Sequence
  Veillonella_sp_oral_taxon_158.GCF_000183505.MDJKJNHE_01282 16S ribosomal RNA (partial)
ttggagagtttgatcctggctcaggacgaacgctggcggcgtgcttaacacatgcaagtcgaacgaagagcgatggaagcttgcttctatcaatcttagtggcgaacgggtgagtaacgcgtaatcaacctgcccttcagagggggacaacagttggaaacgactgctaataccgcatacgatccaacctcggcatcgaggatggatgaaaggtggcctctatttataagctatcactgaaggaggggattgcgtctgattagctagttggaggggtaacggcccaccaaggcaatgatcagtagccggtctgagaggatgaacggccacattgggactgagacacggcccagactcctacgggaggcagcagtggggaatcttccgcaatggacgaaagtctgacggagcaacgccgcgtgagtgatgacggccttcgggttgtaaagctctgttaatcgggacgaaaggtcctcttgcgaatagttagaggaattgacggtaccggaatagaaagccacggctaactacgtgccagcagccgcggtaatacgtaggtggcaagcgttgtccggaattattgggcgtaaagcgcgcgcaggcggatcagtcagtctgtcttaaaagttcggggcttaaccccgtgatgggatggaaactgctgatctagagtatcggagaggaaagtggaattcctagtgtagcggtgaaatgcgtagatataggaagaacaccagtggcgaaggcgactttctggacgaaaactgacgctgaggcgcgaaagccaggggagcgaacgggattagataccccggtagtcctggccgtaaacgatgggtactaggtgtaggaggtatcgaccccttctgtgccggagttaacgc

SEQ ID NO: 96 - DNA, 1561 bp, Artificial Sequence
  Veillonella_sp_oral_taxon_158.GCF_000183505.MDJKJNHE_01728 16S ribosomal RNA
ttggagagtttgatcctggctcaggacgaacgctggcggcgtgcttaacacatgcaagtcgaacgaagagcgatggaagcttgcttctatcaatcttagtggcgaacgggtgagtaacgcgtaatcaacctgcccttcagagggggacaacagttggaaacgactgctaataccgcatacgatccaacctcggcatcgaggatggatgaaaggtggcctctatttataagctatcactgaaggaggggattgcgtctgattagctagttggaggggtaacggcccaccaaggcaatgatcagtagccggtctgagaggatgaacggccacattgggactgagacacggcccagactcctacgggaggcagcagtggggaatcttccgcaatggacgaaagtctgacggagcaacgccgcgtgagtgatgacggccttcgggttgtaaagctctgttaatcgggacgaaaggtcttcttgcgaatagttagaagaattgacggtaccggaatagaaagccacggctaactacgtgccagcagccgcggtaatacgtaggtggcaagcgttgtccggaattattgggcgtaaagcgcgcgcaggcggatcagttagtctgtcttaaaagttcggggcttaaccccgtgatgggatggaaactgctgatctagagtatcggagaggaaagtggaattcctagtgtagcggtgaaatgcgtagatattaggaagaacaccagtggcgaaggcgactttctggacgaaaactgacgctgaggcgcgaaagccaggggagcgaacgggattagataccccggtagtcctggccgtaaacgatgggtactaggtgtaggaggtatcgaccccttctgtgccggagttaacgcaataagtaccccgcctggggagtacgaccgcaaggttgaaactcaaaggaattgacgggggcccgcacaagcggtggagtatgtggtttaattcgacgcaacgcgaagaaccttaccaggtcttgacattgatggacagaactagagatagttcctcttcttcggaagccagaaaacaggtggtgcacggttgtcgtcagctcgtgtcgtgagatgttgggttaagtcccgcaacgagcgcaacccctatcttatgttgccagcacgtaatggtgggaactcatgagagactgccgcagacaatgcggaggaaggcggggatgacgtcaaatcatcatgccccttatgacctgggctacacacgtactacaatgggagttaatagacggaagcgagatcgcgagatggagcaaacccgagaaacactctctcagttcggatcgtaggctgcaactcgcctacgtgaagtcggaatcgctagtaatcgcaggtcagcatactgcggtgaatacgttcccgggccttgtacacaccgcccgtcacaccacgaaagtcggaagtgcccaaagccggtggggtaaccttcgggagccagccgtctaaggtaaagtcgatgattggggtgaagtcgtaacaaggtagccgtatcggaaggtgcggctggatcacctccttt

SEQ ID NO: 97 - DNA, 887 bp, Artificial Sequence
  Veillonella_sp_oral_taxon_158.GCF_000183505.MDJKJNHE_01900 16S ribosomal RNA (partial)
ttggagagtttgatcctggcgtcaggacgaacggctggcggcgtgcttaacacatgcaagtcgaacgaagagcgatggaagcttgcttctatcaatcttagtggcgaacgggtgagtaacgcgtaatcaacctgcccttcagagggggacaacagttggaaacgactgctaataccgcatacgattcgacctcggcatcgaggatggatgaaaggtggcctctatttataagctatcactgaaggaggggattgcgtctgattagctagttggaggggtaacggcccaccaaggcaatgatcagtagccggtctgagaggatgaacggccacattgggactgagacacggcccagactcctacgggaggcagcagtggggaatcttccgcaatggacgaaagtctgacggagcaacgccgcgtgagtgatgacggccttcgggttgtaaagctctgttaatcgggacgaaaggtcctcttgcgaatagttagaggaattgacggtaccggaatagaaagccacggctaactacgtgccagcagccgcggtaatacgtaggtggcaagcgttgtccggaattattgggcgtaaagcgcgcgcaggcggatcagttagtctgtcttaaaagttcggggcttaaccccgtgatgggatggaaactgctgatctagagtatcggagaggaaagtggaattcctagtgtagcggtgaaatgcgtagatattaggaagaacaccagtggcgaaggcgactttctggacgaaaactgacgctgaggcgcgaaagccaggggagcgaacgggattagataccccggtagtcctggccgtaaacgatgggtactaggtgtaggaggtatcgaccccttctgtgccggagttaacgc

SEQ ID NO: 98 - DNA, 1016 bp, Artificial Sequence
  Veillonella_sp_oral_taxon_780.GCF_000221605.ANLHGNCD_00377 16S ribosomal RNA (partial)
cttggagagtttgatcctggctcaggacgaacgctggcggcgtgcttaacacatgcaagtcgaacggacagacagagagcttgctctcttgaagttagtggcgaacgggtgagtaacgcgtaatcaacctgcccttcagagggggataacaacgggaaaccgttgctaataccgcgtacgattcataagtggcatcgcttgtgaatgaaaggtggcctctatgtataagctatcgctgaaggaggggattgcgtctgattagctagttggaggggtaacggcccaccaaggcaatgatcagtagccggtctgagaggatgaacggccacattgggactgagacacggcccaaactcctacgggaggcagcagtggggaatcttccgcaatggacgaaagtctgacggagcaacgccgcgtgagtgatgaaggtcttcggattgtaaagctctgttaatcgggacgaaagagttctgtgtgaataatgcagaaaagtgacggtaccggaatagaaagccacggctaactacgtgccagcagccgcggtaatacgtaggtggcaagcgttgtccggaattattgggcgtaaagcgcgcgcaggcggcctatccagtctgtcttaaaagttcggggctcaaccccgtgatgggatggaaactagtaggctagagtatcggagaggaaagcggaattcctagtgtagcggtgaaatgcgtagatattaggaagaacaccagtggcgaaggcggctttctggacgaaaactgacgctgaggcgcgaaagccaggggagcgaacgggattagataccccggtagtcctggccgtaaacgatgggtactaggtgtaggaggtatcgaccccttctgtgccggagttaacgcaataagtaccccgcctggggagtacggtcgcaaggctgaaactcaaaggaattgacgggggcccgcacaagcggtggagtatgtggtttaattcgacgcaacgcgaagaaccttaccaggtcttgacattga

SEQ ID NO: 99 - DNA, 1559 bp, Artificial Sequence
  Veillonella_sp_oral_taxon_780.GCF_000221605.ANLHGNCD_00528 16S ribosomal RNA
ttggagagtttgatcctggctcaggacgaacgctggcggcgtgcttaacacatgcaagtcgaacggacagacagagagcttgctctcttgaagttagtggcgaacgggtgagtaacgcgtaatcaacctgcccttcagagggggataacaacgggaaaccgttgctaataccgcgtacgattcacaggcggcatcgcttgtgaatgaaaggtggcctctatatataagctatcgctgaaggaggggattgcgtctgattagctagttggaggggtaacggcccaccaaggcaatgatcagtagccggtctgagaggatgaacggccacattgggactgagacacggcccaaactcctacgggaggcagcagtggggaatcttccgcaatggacgaaagtctgacggagcaacgccgcgtgagtgatgaaggtcttcggattgtaaagctctgttaatcgggacgaaagagttctgtgtgaataatgcagaaaagtgacggtaccggaatagaaagccacggctaactacgtgccagcagccgcggtaatacgtaggtggcaagcgttgtccggaattattgggcgtaaagcgcgcgcaggcggcctatccagtctgtcttaaaagttcggggctcaaccccgtgatgggatggaaactagtaggctagagtatcggagaggaaagcggaattcctagtgtagcggtgaaatgcgtagatattaggaagaacaccagtggcgaaggcggctttctggacgaaaactgacgctgaggcgcgaaagccaggggagcgaacgggattagataccccggtagtcctggccgtaaacgatgggtactaggtgtaggaggtatcgaccccttctgtgccggagttaacgcaataagtaccccgcctggggagtacggtcgcaaggctgaaactcaaaggaattgacgggggcccgcacaagcggtggagtatgtggtttaattcgacgcaacgcgaagaaccttaccaggtcttgacattgatggacgaaacaagagattgtttttctccttcgggagccagaaaacaggtggtgcacggctgtcgtcagctcgtgtcgtgagatgttgggttaagtcccgcaacgagcgcaacccctatcttatgttgccagcacgtaaaggtgggaactcatgagagactgccgcagacaatgcggaggaaggcggggatgacgtcaagtcatcatgccccttatgacctgggctacacacgtactacaatgggctttaatagagggaagcgaagccgcgaggtggagcaaaccccagaaacaagctctcagttcggatcgtaggctgcaactcgcctacgtgaagtcggaatcgctagtaatcgcaggtcagcatactgcggtgaatacgttcccgggccttgtacacaccgcccgtcacaccacgaaagtcggaagtacccaaagccggtggggtaaccttcgggagccagccgtctaaggtaaagtcgatgattggggtgaagtcgtaacaaggtagccgtatcggaaggtgcggctggatcacctccttt

SEQ ID NO: 100 - DNA, 1559 bp, Artificial Sequence
  Veillonella_sp_oral_taxon_780.GCF_000221605.ANLHGNCD_00834 16S ribosomal RNA
ttggagagtttgatcctggctcaggacgaacgctggcggcgtgcttaacacatgcaagtcgaacggacagacagagagcttgctctcttgaagttagtggcgaacgggtgagtaacgcgtaatcaacctgcccttcagagggggataacaacgggaaaccgttgctaataccgcgtacgattcacaggcggcatcgcttgtgaatgaaaggtggcctctatatataagctatcgctgaaggaggggattgcgtctgattagctagttggaggggtaacggcccaccaaggcaatgatcagtagccggtctgagaggatgaacggccacattgggactgagacacggcccaaactcctacgggaggcagcagtggggaatcttccgcaatggacgaaagtactgacggagcaacgccgcgtgagtgatgaaggtcttcggattgtaaagctctgttaatcgggacgaaagagttctgtgtgaataatgcagaaaagtgacggtaccggaatagaaagccacggctaactacgtgccagcagccgcggtaatacgtaggtggcaagcgttgtccggaattattgggcgtaaagcgcgcgcaggcggcctatccagtctgtcttaaaagttcggggctcaaccccgtgatgggatggaaactagtaggctagagtatcggagaggaaagcggaattcctagtgtagcggtgaaatgcgtagatattaggaagaacaccagtggcgaaggcggctttctggacgaaaactgacgctgaggcgcgaaagccaggggagcgaacgggattagataccccggtagtcctggccgtaaacgatgggtactaggtgtaggaggtatcgaccccttctgtgccggagttaacgcaataagtaccccgcctggggagtacggtcgcaaggctgaaactcaaaggaattgacgggggcccgcacaagcggtggagtatgtggtttaattcgacgcaacgcgaagaaccttaccaggtcttgacattgatggacgaagcaagagattgtttttctccttcgggagccagaaaacaggtggtgcacggctgtcgtcagctcgtgtcgtgagatgttgggttaagtcccgcaacgagcgcaacccctatcttatgttgccagcacttcgggtgggaactcatgagagactgccgcagacaatgcggaggaaggcggggatgacgtcaagtcatcatgccccttatgacctgggctacacacgtactacaatgggctttaatagagggaagcgaagccgcgaggtggagcaaaccccagaaacaagctctcagttcggatcgtaggctgcaactcgcctacgtgaagtcggaatcgctagtaatcgcaggtcagcatactgcggtgaatacgttcccgggccttgtacacaccgcccgtcacaccacgaaagtcggaagtacccaaagccggtggggtaaccttcgggagccagccgtctaaggtaaagtcgatgattggggtgaagtcgtaacaaggtagccgtatcggaaggtgcggctggatcacctccttt

SEQ ID NO: 101 - DNA, 1558 bp, Artificial Sequence
  Veillonella_sp_oral_taxon_780.GCF_000221605.ANLHGNCD_01072 16S ribosomal RNA
ttggagagtttgatcctggctcaggacgaacgctggcggcgtgcttaacacatgcaagtcgaacggacagacagagagcttgctctcttgaagttagtggcgaacgggtgagtaacgcgtaatcaacctgcccttcagagggggataacaacgggaaaccgttgctaataccgcgtacgattcataggcggcatcgcttgtgaatgaaaggtggcctctatatataagctatcgctgaaggaggggattgcgtctgattagctagttggaggggtaacggcccaccaaggcaatgatcagtagccggtctgagaggatgaacggccacattgggactgagacacggcccaaactcctacgggaggcagcagtggggaatcttccgcaatggacgaaagtctgacggagcaacgccgcgtgagtgatgaaggtcttcggattgtaaagctctgttaatcgggacgaaagagttctgtgtgaataatgcagaaaagtgacggtaccggaatagaaagccacggctaactacgtgccagcagccgcggtaatacgtaggtggcaagcgttgtccggaattattgggcgtaaagcgcgcgcaggcggcctatccagtctgtcttaaaagttcggggctcaaccccgtgatgggatggaaactagtaggctagagtatcggagaggaaagcggaattcctagtgtagcggtgaaatgcgtagatattaggaagaacaccagtggcgaaggcggctttctggacgaaaactgacgctgaggcgcgaaagccaggggagcgaacgggattagataccccggtagtcctggccgtaaacgatgggtactaggtgtaggaggtatcgaccccttctgtgccggagttaacgcaataagtaccccgcctggggagtacggtcgcaaggctgaaactcaaaggaattgacgggggcccgcacaagcggtggagtatgtggtttaattcgacgcaacgcgaagaaccttaccaggtcttgacattgatggacgaaacaagagattgtttttctccttcgggagccagaaaacaggtggtgcacggctgtcgtcagctcgtgtcgtgagatgttgggttaagtcccgcaacgagcgcaacccctatcttatgttgccagcacttcgggtgggaactcatgagagactgccgcagacaatgcggaggaaggcggggatgacgtcaagtcatcatgccccttatgacctgggctacacacgtactacaatgggctttaatagagggaagcgaagccgcgaggtggagcaaaccccagaaacaagctctcagttcggatcgtaggctgcaactcgcctacgtgaagtcggaatcgctagtaatcgcaggtcagcatactgcggtgaatacgttcccgggccttgtacacaccgcccgtcacaccacgaaagtcggaagtacccaaagccggtggggtaaccttcgggagccagccgtctaaggtaaagtcgatgattggggtgaagtcgtaacaaggtagccgtatcggaaggtgcggctggatcacctccttt

SEQ ID NO: 102 - DNA, 1248 bp, artificial sequence
  SPC11312_contig000132_1_1248
ggctcaccaaggcgacgatcagtagccggactgagaggttggccggccacattgggactgagacacggcccagactcctacgggaggcagcagtggggaatattgggcaatgggcgaaagcctgacccagcaacgccgcgtgaaggaagaaggccctcgggttgtaaacttcttttgtcagggacgaagcaagtgacggtacctgacgaataagccacggctaactacgtgccagcagccgcggtaatacgtaggtggcaagcgttatccggatttactgggtgtaaagggcgtgtaggcgggagtgcaagtcagatgtgaaaactatgggctcaacccatagcctgcatttgaaactgtacttcttgagtgatggagaggcaggcggaattccctgtgtagcggtgaaatgcgtagatatagggaggaacaccagtggcgaaggcggcctgctggacattaactgacgctgaggcgcgaaagcgtggggagcaaacaggattagataccctggtagtccacgccgtaaacgatggatactaggtgtggggggtctgaccccctccgtgccgcagttaacacaataagtatcccacctggggagtacgatcgcaaggttgaaactcaaaggaattgacgggggcccgcacaagcggtggagtatgtggtttaattcgaagcaacgcgaagaaccttaccaggacttgacatcctactaacgaagcagagatgcataaggtgcccttcggggaaagtagagacaggtggtgcatggttgtcgtcagctcgtgtcgtgagatgttgggttaagtcccgcaacgagcgcaacccttattgttagttgctacgcaagagcactctagcgagactgccgttgacaaaacggaggaaggtggggacgacgtcaaatcatcatgccccttatgtcctgggccacacacgtactacaatggcggtcaacagagggaagcaaagccgcgaggtggagcaaatccctaaaagccgtcccagttcggattgcaggctgaaactcgcctgtatgaagtcggaatcgctagtaatcgcggatcagcatgccgcggtgaatacgttcccgggccttgtacacaccgcccgtcacaccatgagagtcgggaacacccgaagtccgtagcctaacagcaatgggggcgcggccgaaggtgggttcgataattggggtgaagtcgtaacaaggtagccgtatcggaaggtgcggctggatcacct

SEQ ID NO: 103 - DNA, 1491 bp, artificial sequence
  SPC10925_contig000052_38_1528
agagtttgatcctggctcaggatgaacgctggcggcgtgcctaacacatgcaagtcgagcgattctcttcggagaagagcggcggacgggtgagtaacgcgtgggtaacctgccctgtacacacggataacataccgaaaggtatgctaatacgggataacataagaaattcgcatgtttttcttatcaaagctccggcggtacaggatggacccgcgtctgattagctagttggtgaggtaacggctcaccaaggcgacgatcagtagccgacctgagagggtgatcggccacattggaactgagacacggtccaaactcctacgggaggcagcagtggggaatattgcacaatgggcgaaagcctgatgcagcaacgccgcgtgagcgatgaaggccttcgggtcgtaaagctctgtcctcaaggaagataatgacggtacttgaggaggaagccccggctaactacgtgccagcagccgcggtaatacgtagggggctagcgttatccggatttactgggcgtaaagggtgcgtaggcggtcttttaagtcaggagtgaaaggctacggctcaaccgtagtaagctcttgaaactggaggacttgagtgcaggagaggagagtggaattcctagtgtagcggtgaaatgcgtagatattaggaggaacaccagtagcgaaggcggctctctggactgtaactgacgctgaggcacgaaagcgtggggagcaaacaggattagataccctggtagtccacgccgtaaacgatgagtactaggtgtcgggggttacccccctcggtgccgcagctaacgcattaagtactccgcctggggagtacgctcgcaagagtgaaactcaaaggaattgacggggacccgcacaagtagcggagcatgtggtttaattcgaagcaacgcgaagaaccttacctaagcttgacatccttttgaccgatgcctaatcgcatctttcccttcggggacagaagtgacaggtggtgcatggttgtcgtcagctcgtgtcgtgagatgttgggttaagtcccgcaacgagcgcaacccttgcctttagttgccatcattaagttgggcactctagagggactgccagggataacctggaggaaggtggggatgacgtcaaatcatcatgccccttatgcttagggctacacacgtgctacaatgggtggtacagagggcagcgaagtcgtgaggccaagctaatcccttaaagccattctcagttcggattgtaggctgaaactcgcctacatgaagctggagttactagtaatcgcagatcagaatgctgcggtgaatgcgttcccgggtcttgtacacaccgcccgtcacaccatgggagttgggggcgcccgaagccggctagctaaccttttggaagcggtcgtcgaaggtgaaaccaataactggggtgaagtcgtaacaaggtagccgtatcggaaggtgcggctggatcacct

SEQ ID NO: 104 - DNA, 1520 bp, artificial sequence
  SPC11756_contig000082_314_1833
agagtttgatcctggctcaggatgaacgctggcggcgtgcctaacacatgcaagtcgaacgaagttacacagaggaagttttcggatggaatcagtataacttagtggcggacgggtgagtaacgcgtgggaaacctgccctgtaccgggggataacacttagaaataggtgctaataccgcataagcgcacggatccgcatggttctgtgtgaaaaactccggtggtacaggatggtcccgcgtctgattagccagttggcagggtaacggcctaccaaagcgacgatcagtagccggcctgagagggtgaacggccacattgggactgagacacggcccaaactcctacgggaggcagcagtggggaatattgcacaatgggggaaaccctgatgcagcgacgccgcgtgagtgaagaagtatttcggtatgtaaagctctatcagcagggaagaaaatgacggtacctgactaagaagccccggctaactacgtgccagcagccgcggtaatacgtagggggcaagcgttatccggatttactgggtgtaaagggagcgtagacggcatggcaagccagatgtgaaaacccagggctcaaccttgggattgcatttggaactgccaggctggagtgcaggagaggtaagcggaattcctagtgtagcggtgaaatgcgtagatattaggaggaacaccagtggcgaaggcggcttactggactgtaactgacgttgaggctcgaaagcgtggggagcaaacaggattagataccctggtagtccacgcggtaaacgatgattgctaggtgtaggtgggtatggacccatcggtgccgcagctaacgcaataagcaatccacctggggagtacgttcgcaagaatgaaactcaaaggaattgacggggacccgcacaagcggtggagcatgtggtttaattcgaagcaacgcgaagaaccttaccaagtcttgacatcccaatgacgcgcctgtaaagaggtgttcccttcggggcattggagacaggtggtgcatggttgtcgtcagctcgtgtcgtgagatgttgggttaagtcccgcaacgagcgcaacccttattcttagtagccagcaggtagagctgggcactctaaggagactgccggggataacccggaggaaggcggggatgacgtcaaatcatcatgccccttatgatttgggctacacacgtgctacaatggcgtaaacaaagggaagcgagacagtgatgtggagcaaatcccagaaataacgtctcagttcggattgtagtctgcaactcgactacatgaagctggaatcgctagtaatcgcgaatcagcatgtcgcggtgaatacgttcccgggtcttgtacacaccgcccgtcacaccatgggagttggaaatgcccgaagtctgtgacctaaccgaaagggaggagcagccgaaggcaggtctgataactggggtgaagtcgtaacaaggtagccgtatcggaaggtgcggctggatcacct

SEQ ID NO: 105 - DNA, 1502 bp, artificial sequence
  SPC10439_contig000095_88_1589
agagtttgatcctggctcaggacgaacgctggcggcgcgcctaacacatgcaagtcgaacggaacttgagagagcttgctttttcaagtttagtggcgaacgggtgagtaacgcgtgagtaacctgccctggagtgggggacaacagttggaaacgactgctaataccgcataagcccacggcaccgcatggtactgagggaaaaggatttattcgcttcaggatggactcgcgtccaattagctagttggtgaggtaacggcccaccaaggcgacgattggtagccggactgagaggttgaacggccacattgggactgagacacggcccagactcctacgggaggcagcagtgggggatattgcacaatgggggaaaccctgatgcagcgacgccgcgtggaggaagaaggttttcggattgtaaactcctgtcgtacgggacgataatgacggtaccgtacaagaaagccacggctaactacgtgccagcagccgcggtaaaacgtaggtggcaagcgttgtccggaattactgggtgtaaagggagcgcaggcggaccggcaagttggaagtgaaatctatgggctcaacccataaattgctttcaaaactgctggccttgagtagtgcagaggtaggcggaattcccggtgtagcggtggaatgcgtagatatcgggaggaacaccagtggcgaaggcggcctactgggcaccaactgacgctgaggctcgaaagcatgggtagcaaacaggattagataccctggtagtccatgccgtaaacgatgattactaggtgttggaggattgaccccttcagtgccgcagttaacacaataagtaatccacctggggagtacgaccgcaaggttgaaactcaaaggaattgacgggggcccgcacaagcagtggagtatgtggtttaattcgaagcaacgcgaagaaccttaccaggtcttgacatccgatgcatagtgcagagatgcatgaagtccttcgggacatcgagacaggtggtgcatggttgtcgtcagctcgtgtcgtgagatgttgggttaagtcccgcaacgagcgcaacccttattgccagttactacgcaagaggactctggcgagactgccgttgacaaaacggaggaaggtggggatgacgtcaaatcatcatgccctttatgacctgggctacacacgtactacaatggcgtttaacaaagagaagcaataccgcgaggtggagcaaaactcaaaaacaacgtctcagttcagattgcaggctgcaactcgcctgcatgaagtcggaattgctagtaatcgcggatcagcatgccgcggtgaatacgttcccgggccttgtacacaccgcccgtcacaccatgagagccggggggacccgaagtccgtagtctaaccgcaaggaggacgcggccgaaggtaaaactggtgattggggtgaagtcgtaacaaggtagccgtatcggaaggtgcggctggatcacct

SEQ ID NO: 106 - DNA, 1234 bp, artificial sequence
  SPC12243_contig000075_330_1563
cgatcagtagccgacctgagagggtgaccggccacattgggactgagacacggcccaaactcctacgggaggcagcagtggggaatattgcacaatgggggaaaccctgatgcagcgacgccgcgtgagcgaagaagtatttcggtatgtaaagctctatcagcagggaagaagaatgacggtacctgactaagaagcaccggctaaatacgtgccagcagccgcggtaatacgtatggtgcaagcgttatccggatttactgggtgtaaagggagcgcaggcggtacggcaagtctgatgtgaaatcccggggctcaaccccggtactgcattggaaactgtcggactagagtgtcggaggggtaagtggaattcctagtgtagcggtgaaatgcgtagatattaggaggaacaccagtggcgaaggcggcttactggacgattactgacgctgaggctcgaaagcgtggggagcaaacaggattagataccctggtagtccacgccgtaaacgatgaatactaggtgtcggggagcattgctcttcggtgccgcagcaaacgcaataagtattccacctggggagtacgttcgcaagaatgaaactcaaaggaattgacggggacccgcacaagcggtggagcatgtggtttaattcgaagcaacgcgaagaaccttaccaagtcttgacatcccactgaccgagtatgtaatgtactttctcttcggagcagtggtgacaggtggtgcatggttgtcgtcagctcgtgtcgtgagatgttgggttaagtcccgcaacgagcgcaacccctattcttagtagccagcggtttggccgggcactctagggagactgccagggataacctggaggaaggtggggatgacgtcaaatcatcatgccccttatgacttgggctacacacgtgctacaatggcgtaaacaaagggaagcaatcccgcgagggggagcaaatctcaaaaataacgtctcagttcggactgtagtctgcaactcgactacacgaagctggaatcgctagtaatcgcgaatcagaatgtcgcggtgaatacgttcccgggtcttgtacacaccgcccgtcacaccatgggagttggtaatgcccgaagtcagtgacccaaccgcaaggagggagctgccgaaggcaggactgataactggggtgaagtcgtaacaaggtagccgtatcggaaggtgcggctggatcacct

SEQ ID NO: 107 - DNA, 1521 bp, artificial sequence
  SPC10415_contig000001_33168_34688
agagtttgatcctggctcaggatgaacgctggcggcgtgcttaacacatgcaagtcgagcgaagcgcttaaacggatttcttcggattgaagtttttgtgactgagcggcggacgggtgagtaacgcgtgggtaacctgcctcatacagggggataacagttagaaatggctgctaataccgcataagcgcacaggaccgcatggtctggtgtgaaaaactccggtggtatgagatggacccgcgtctgattagctagttggaggggtaacggcccaccaaggcgacgatcagtagccggcctgagagggtgaacggccacattgggactgagacacggcccagactcctacgggaggcagcagtggggaatattgcacaatgggggaaaccctgatgcagcgacgccgcgtgaaggaagaagtatctcggtatgtaaacttctatcagcagggaagaaaatgacggtacctgactaagaagccccggctaactacgtgccagcagccgcggtaatacgtagggggcaagcgttatccggatttactgggtgtaaagggagcgtagacggaagagcaagtctgatgtgaaaggctggggcttaaccccaggactgcattggaaactgtttttctagagtgccggagaggtaagcggaattcctagtgtagcggtgaaatgcgtagatattaggaggaacaccagtggcgaaggcggcttactggacggtaactgacgttgaggctcgaaagcgtggggagcaaacaggattagataccctggtagtccacgccgtaaacgatgaatactaggtgtcgggtggcaaagccattcggtgccgcagcaaacgcaataagtattccacctggggagtacgttcgcaagaatgaaactcaaaggaattgacggggacccgcacaagcggtggagcatgtggtttaattcgaagcaacgcgaagaaccttaccaagtcttgacatccctctgaccggcccgtaacggggccttcccttcggggcagaggagacaggtggtgcatggttgtcgtcagctcgtgtcgtgagatgttgggttaagtcccgcaacgagcgcaacccctatccttagtagccagcaggtgaagctgggcactctagggagactgccggggataacccggaggaaggcggggacgacgtcaaatcatcatgccccttatgatttgggctacacacgtgctacaatggcgtaaacaaagggaagcgagacagcgatgttgagcaaatcccaaaaataacgtcccagttcggactgcagtctgcaactcgactgcacgaagctggaatcgctagtaatcgcgaatcagaatgtcgcggtgaatacgttcccgggtcttgtacacaccgcccgtcacaccatgggagtcagtaacgcccgaagtcagtgacccaaccttataggagggagctgccgaaggcgggaccgataactggggtgaagtcgtaacaaggtagccgtatcggaaggtgcggctggatcacct

SEQ ID NO: 108 - DNA, 1521 bp, artificial sequence
  SPC10415_contig000002_1030498_1032018
agagtttgatcctggctcaggatgaacgctggcggcgtgcttaacacatgcaagtcgagcgaagcacttgaacggatttcttcggattgaagtttttgtgactgagcggcggacgggtgagtaacgcgtgggtaacctgcctcatacagggggataacagttagaaatggctgctaataccgcataagcgcacaggaccgcatggtctggtgtgaaaaactccggtggtatgagatggacccgcgtctgattagctagttggaggggtaacggcccaccaaggcaacgatcagtagccggcctgagagggtgaacggccacattgggactgagacacggcccagactcctacgggaggcagcagtggggaatattgcacaatgggggaaaccctgatgcagcgacgccgcgtgaaggaagaagtatctcggtatgtaaacttctatcagcagggaagaaaatgacggtacctgactaagaagccccggctaactacgtgccagcagccgcggtaatacgtagggggcaagcgttatccggatttactgggtgtaaagggagcgtagacggaagagcaagtctgatgtgaaaggctggggcttaaccccaggactgcattggaaactgtttttctagagtgccggagaggtaagcggaattcctagtgtagcggtgaaatgcgtagatattaggaggaacaccagtggcgaaggcggcttactggacggtaactgacgttgaggctcgaaagcgtggggagcaaacaggattagataccctggtagtccacgccgtaaacgatgaatactaggtgtcgggtggcaaagccattcggtgccgcagcaaacgcaataagtattccacctggggagtacgttcgcaagaatgaaactcaaaggaattgacggggacccgcacaagcggtggagcatgtggtttaattcgaagcaacgcgaagaaccttaccaagtcttgacatccctctgaccggcccgtaacggggccttcccttcggggcagaggagacaggtggtgcatggttgtcgtcagctcgtgtcgtgagatgttgggttaagtcccgcaacgagcgcaacccctatccttagtagccagcaggtgaagctgggcactctagggagactgccggggataacccggaggaaggcggggacgacgtcaaatcatcatgccccttatgatttgggctacacacgtgctacaatggcgtaaacaaagggaagcgagacagcgatgttgagcaaatcccaaaaataacgtcccagttcggactgcagtctgcaactcgactgcacgaagctggaatcgctagtaatcgcgaatcagaatgtcgcggtgaatacgttcccgggtcttgtacacaccgcccgtcacaccatgggagtcagtaacgcccgaagtcagtgacccaaccttataggagggagctgccgaaggcgggaccgataactggggtgaagtcgtaacaaggtagccgtatcggaaggtgcggctggatcacct

SEQ ID NO: 109 - DNA, 1521 bp, artificial sequence
  SPC10415_contig000001_2643743_2645263
agagtttgatcctggctcaggatgaacgctggcggcgtgcttaacacatgcaagtcgagcgaagcacttgaacggatttcttcggattgaagtttttgtgactgagcggcggacgggtgagtaacgcgtgggtaacctgcctcatacagggggataacagttagaaatggctgctaataccgcataagcgcacaggaccgcatggtctggtgtgaaaaactccggtggtatgagatggacccgcgtctgattagctagttggaggggtaacggcccaccaaggcgacgatcagtagccggcctgagagggtgaacggccacattgggactgagacacggcccagactcctacgggaggcagcagtggggaatattgcacaatgggggaaaccctgatgcagcgacgccgcgtgaaggaagaagtatctcggtatgtaaacttctatcagcagggaagaaaatgacggtacctgactaagaagccccggctaactacgtgccagcagccgcggtaatacgtagggggcaagcgttatccggatttactgggtgtaaagggagcgtagacggaagagcaagtctgatgtgaaaggctggggcttaaccccaggactgcattggaaactgtttttctagagtgccggagaggtaagcggaattcctagtgtagcggtgaaatgcgtagatattaggaggaacaccagtggcgaaggcggcttactggacggtaactgacgttgaggctcgaaagcgtggggagcaaacaggattagataccctggtagtccacgccgtaaacgatgaatactaggtgtcgggtggcaaagccattcggtgccgcagcaaacgcaataagtattccacctggggagtacgttcgcaagaatgaaactcaaaggaattgacggggacccgcacaagcggtggagcatgtggtttaattcgaagcaacgcgaagaaccttaccaagtcttgacatccctctgaccggcccgtaacggggccttcccttcggggcagaggagacaggtggtgcatggttgtcgtcagctcgtgtcgtgagatgttgggttaagtcccgcaacgagcgcaacccctatccttagtagccagcaggtgaagctgggcactctagggagactgccggggataacccggaggaaggcggggacgacgtcaaatcatcatgccccttatgatttgggctacacacgtgctacaatggcgtaaacaaagggaagcgagacagtgatgttgagcaaatcccaaaaataacgtcccagttcggactgcagtctgcaactcgactgcacgaagctggaatcgctagtaatcgcgaatcagaatgtcgcggtgaatacgttcccgggtcttgtacacaccgcccgtcacaccatgggagtcagtaacgcccgaagtcagtgacccaaccttataggagggagctgccgaaggcgggaccgataactggggtgaagtcgtaacaaggtagccgtatcggaaggtgcggctggatcacct

SEQ ID NO: 110 - DNA, 1521 bp, artificial sequence
  SPC10415_contig000001_50253_51773
agagtttgatcctggctcaggatgaacgctggcggcgtgcttaacacatgcaagtcgagcgaagcacttaagcggatctcttcggattgaaacttatttgactgagcggcggacgggtgagtaacgcgtgggtaacctgcctcatacagggggataacagttagaaatggctgctaataccgcataagcgcacaggaccgcatggtctggtgtgaaaaactccggtggtatgagatggacccgcgtctgattagctagttggaggggtaacggcccaccaaggcgacgatcagtagccggcctgagagggtgaacggccacattgggactgagacacggcccagactcctacgggaggcagcagtggggaatattgcacaatgggggaaaccctgatgcagcgacgccgcgtgaaggaagaagtatctcggtatgtaaacttctatcagcagggaagaaaatgacggtacctgactaagaagccccggctaactacgtgccagcagccgcggtaatacgtagggggcaagcgttatccggatttactgggtgtaaagggagcgtagacggaagagtaagtctgatgtgaaaggctggggcttaaccccaggactgcattggaaactgtttttctagagtgccggagaggtaagcggaattcctagtgtagcggtgaaatgcgtagatattaggaggaacaccagtggcgaaggcggcttactggacggtaactgacgttgaggctcgaaagcgtggggagcaaacaggattagataccctggtagtccacgccgtaaacgatgaatactaggtgtcgggtggcaaagccattcggtgccgcagcaaacgcaataagtattccacctggggagtacgttcgcaagaatgaaactcaaaggaattgacggggacccgcacaagcggtggagcatgtggtttaattcgaagcaacgcgaagaaccttaccaagtcttgacatccctctgaccggcccgtaacggggccttcccttcggggcagaggagacaggtggtgcatggttgtcgtcagctcgtgtcgtgagatgttgggttaagtcccgcaacgagcgcaacccctatccttagtagccagcaggtgaagctgggcactctagggagactgccggggataacccggaggaaggcggggacgacgtcaaatcatcatgccccttatgatttgggctacacacgtgctacaatggcgtaaacaaagggaagcgagacagtgatgttgagcaaatcccaaaaataacgtcccagttcggactgcagtctgcaactcgactgcacgaagctggaatcgctagtaatcgcgaatcagaatgtcgcggtgaatacgttcccgggtcttgtacacaccgcccgtcacaccatgggagtcagtaacgcccgaagtcagtgacccaaccttataggagggagctgccgaaggcgggaccgataactggggtgaagtcgtaacaaggtagccgtatcggaaggtgcggctggatcacct

SEQ ID NO: 111 - DNA, 1521 bp, artificial sequence
  SPC10415_contig000002_1918626_1920146
agagtttgatcctggctcaggatgaacgctggcggcgtgcttaacacatgcaagtcgagcgaagcgcttaaacggatttcttcggattgaagtttttgtgactgagcggcggacgggtgagtaacgcgtgggtaacctgcctcatacagggggataacagttagaaatggctgctaataccgcataagcgcacaggaccgcatggtctggtgtgaaaaactccggtggtatgagatggacccgcgtctgattagctagttggaggggtaacggcccaccaaggcgacgatcagtagccggcctgagagggtgaacggccacattgggactgagacacggcccagactcctacgggaggcagcagtggggaatattgcacaatgggggaaaccctgatgcagcgacgccgcgtgaaggaagaagtatctcggtatgtaaacttctatcagcagggaagaaaatgacggtacctgactaagaagccccggctaactacgtgccagcagccgcggtaatacgtagggggcaagcgttatccggatttactgggtgtaaagggagcgtagacggaagagcaagtctgatgtgaaaggctggggcttaaccccaggactgcattggaaactgtttttctagagtgccggagaggtaagcggaattcctagtgtagcggtgaaatgcgtagatattaggaggaacaccagtggcgaaggcggcttactggacggtaactgacgttgaggctcgaaagcgtggggagcaaacaggattagataccctggtagtccacgccgtaaacgatgaatactaggtgtcgggtggcaaagccattcggtgccgcagcaaacgcaataagtattccacctggggagtacgttcgcaagaatgaaactcaaaggaattgacggggacccgcacaagcggtggagcatgtggtttaattcgaagcaacgcgaagaaccttaccaagtcttgacatccctctgaccggcccgtaacggggccttcccttcggggcagaggagacaggtggtgcatggttgtcgtcagctcgtgtcgtgagatgttgggttaagtcccgcaacgagcgcaacccctatccttagtagccagcaggtgaagctgggcactctagggagactgccggggataacccggaggaaggcggggacgacgtcaaatcatcatgccccttatgatttgggctacacacgtgctacaatggcgtaaacaaagggaagcgagacagcgatgttgagcaaatcccaaaaataacgtcccagttcggactgcagtctgcaactcgactgcacgaagctggaatcgctagtaatcgcgaatcagaatgtcgcggtgaatacgttcccgggtcttgtacacaccgcccgtcacaccatgggagtcagtaacgcccgaagtcagtgacccaaccttttaggagggagctgccgaaggcgggaccgataactggggtgaagtcgtaacaaggtagccgtatcggaaggtgcggctggatcacct

SEQ ID NO: 112 - DNA, 1425 bp, artificial sequence
  SPC11540_contig000048_1_1425
ggcgaccggcgcacgggtgcgtaacgcgtatgtaacctacctataacaggggcataacactgagaaattggtactaattccccataatattcggagaggcatctctccgggttgaaaactccggtggttatagatggacatgcgttgtattagctagttggtgaggtaacggctcaccaaggcaacgatacatagggggactgagaggttaaccccccacactggtactgagacacggaccagactcctacgggaggcagcagtgaggaatattggtcaatggacgcaagtctgaaccagccatgccgcgtgcaggaagacggctctatgagttgtaaactgcttttgtacgagggtaaactcacctacgtgtaggtgactgaaagtatcgtacgaataaggatcggctaactccgtgccagcagccgcggtaatacggaggattcaagcgttatccggatttattgggtttaaagggtgcgtaggcggtttgataagttagaggtgaaatcccggggcttaactccggaactgcctctaatactgttagactagagagtagttgcggtaggcggaatgtatggtgtagcggtgaaatgcttagagatcatacagaacaccgattgcgaaggcagcttaccaaactatatctgacgttgaggcacgaaagcgtggggagcaaacaggattagataccctggtagtccacgcagtaaacgatgataactcgttgtcggcgatacacagtcggtgactaagcgaaagcgataagttatccacctggggagtacgttcgcaagaatgaaactcaaaggaattgacgggggcccgcacaagcggaggaacatgtggtttaattcgatgatacgcgaggaaccttacccgggcttgaaagttactgacgattctggaaacaggatttcccttcggggcaggaaactaggtgctgcatggttgtcgtcagctcgtgccgtgaggtgtcgggttaagtcccataacgagcgcaacccctaccgttagttgccatcaggtcaagctgggcactctggcgggactgccggtgtaagccgagaggaaggtggggatgacgtcaaatcagcacggcccttacgtccggggctacacacgtgttacaatggtaggtacagagggtcgctaccccgcgaggggatgccaatctcgaaagcctatctcagttcggattggaggctgaaacccgcctccatgaagttggattcgctagtaatcgcgcatcagccatggcgcggtgaatacgttcccgggccttgtacacaccgcccgtcaagccatggaagctgggggtgcctgaagttcgtgaccgcaaggagcgacctagggcaaaaccggtaactggggctaagtcgtaacaaggtagccgtaccggaaggtgcggctggaacacct

SEQ ID NO: 113 - DNA, 1276 bp, artificial sequence
  PPC00252_contig000033_1_1276
agagtttgatcctggctcaggatgaacgctggcggcgtgcctaatacatgcaagtagaacgctgaagcttggtgcttgcaccgagcggatgagttgcgaacgggtgagtaacgcgtaggtaacctgcctgttagcgggggataactattggaaacgatagctaataccgcataacagtcgacattgcatgatgttgatttgaaaggggcaaatgctccactaccagatggacctgcgttgtattagctagttggtgaggtaacggctcaccaaggcgacgatacatagccgacctgagagggtgatcggccacactgggactgagacacggcccagactcctacgggaggcagcagtagggaatcttcggcaatgggggcaaccctgaccgagcaacgccgcgtgagtgaagaaggttttcggatcgtaaagctctgttgtaagagaagaacgagtgtgagagtggaaagttcacactgtgacggtaacttaccagaaagggacggctaactacgtgccagcagccgcggtaatacgtaggtcccgagcgttatccggatttattgggcgtaaagcgagcgcaggcggttagataagtctgaagttaaaggctgtggcttaaccatagtacgctttggaaactgtttaacttgagtgcagaaggggagagtggaattccatgtgtagcggtgaaatgcgtagatatatggaggaacaccggtggcgaaagcggctctctggtctgtaactgacgctgaggctcgaaagcgtggggagcaaacaggattagataccctggtagtccacgccgtaaacgatgagtgctaggtgttgggtcctttccgggactcagtgccgcagctaacgcattaagcactccgcctggggagtacgaccgcaaggttgaaactcaaaggaattgacgggggcccgcacaagcggtggagcatgtggtttaattcgaagcaacgcgaagaaccttaccaggtcttgacatccctctgaccgctctagagatagagttttccttcgggacagaggtgacaggtggtgcatggttgtcgtcagctcgtgtcgtgagatgttgggttaagtcccgcaacgagcgcaacccctattgttagttgccatcattgagttgggcactctagcgagactgccggtaataaaccggaggaaggtggggatgacgtcaaatcatcatgccccttatgacctgggctacacacgtgctacaatggctggtacaacgagtcgcgagtcggtgacggcaagc

SEQ ID NO: 114 - DNA, 1513 bp, artificial sequence
  SPC12479_contig000001_39554_41066
tttagagagtttgatcctggctcaggacgaacgctggcggcgtgcctaacacatgcaagtcgaacggacgagagggagcttgctccctcaagttagtggcggacgggtgagtaacgcgtgagtaacctgcctttcagaggggaataacattctgaaaaggatgctaataccgcatgacatcgtagtatcgcatggtacagcgatcaaaggagcaatccgctgaaagatggactcgcgtccgattagctagttggcgggataaaggcccaccaaggcgacgatcggtagccggactgagaggttgatcggccacattgggactgagacacggcccagactcctacgggaggcagcagtgggggatattgcacaatgggggaaaccctgatgcagcaacgccgcgtgaaggaagaaggtcttcggattgtaaacttctgtcctcagggaagataatgacggtacctgaggaggaagctccggctaactacgtgccagcagccgcggtaatacgtagggagcgagcgttgtccggatttactgggtgtaaagggtgcgtaggcggatctgcaagtcagtagtgaaatcccagggcttaaccctggaactgctattgaaactgtgggtcttgagtgaggtagaggcaggcggaattcccggtgtagcggtgaaatgcgtagagatcgggaggaacaccagtggcgaaggcggcctgctgggccttaactgacgctgaggcacgaaagcatgggtagcaaacaggattagataccctggtagtccatgccgtaaacgatgattactaggtgtgggtggtctgaccccatccgtgccggagttaacacaataagtaatccacctggggagtacggccgcaaggttgaaactcaaaggaattgacgggggcccgcacaagcagtggagtatgtggtttaattcgaagcaacgcgaagaaccttaccaggtcttgacatcctgctaacgaggtagagatacgttaggtgcccttcggggaaagcagagacaggtggtgcatggttgtcgtcagctcgtgtcgtgagatgttgggttaagtcccgcaacgagcgcaacccctgctattagttgctacgcaagagcactctaataggactgccgttgacaaaacggaggaaggtggggacgacgtcaaatcatcatgccccttatgacctgggctacacacgtactacaatggccgtcaacagagagaagcaaaactgcgaagtggagcaaaactctaaaaacggtcccagttcggatcgtaggctgcaacccgcctacgtgaagttggaattgctagtaatcgcggatcatcatgccgcggtgaatacgttcccgggccttgtacacaccgcccgtcacaccatgggagccggtaatacccgaagtcagtagtctaaccgcaagggggacgctgccgaaggtaggattggcgactggggtgaagtcgtaacaaggtagccgtatcggaaggtgcggctggatcacctccttt

SEQ ID NO: 115 - DNA, 1497 bp, artificial sequence
  SPC10661_contig000025_3147_4643
agagtttgatcctggctcaggatgaacgctggcggcgtgcctaacacatgcaagtcgaacgattaaagcgccttcgggcgtgtatagagtggcgaacgggtgagtaacacgtgaccaacctacccttctcttcgggacaaccttgggaaaccgaggctaataccgaatactccggtgagtgcgcatgcacacgccgggaaagctttcgcggagaaggatggggtcgcggcccatcaggtagacggcggggtagcggcccaccgtgcttttgacgggtagccgggttgagagaccgaccggccacattgggactgagatacggcccagactcctacgggaggcagcagtggggaattttgcgcaatgggggaaaccctgacgcagcaacgccgcgtgcgggatgaaggccttcgggtcgtaaaccgctttcagcagggaagaaattcgacggtacctgcagaagaagccccggctaactacgtgccagcagccgcggtaatacgtagggggcgagcgttatccggattcattgggcgtaaagcgcgcgtaggcggccgcctaagcgggacctctaaccttggggctcaacctcaagccgggttccgaactgggtggctcgagtttggtagaggaagatggaattcccggtgtagcggtggaatgcgcagatatcgggaagaacaccgatggcgaaggcagtcttctgggccataactgacgctgaggcgcgaaagctaggggagcaaacaggattagataccctggtagtcctagccgtaaacgatgggcactaggtgtggggagatactctttccgtgccgaagcaaacgcattaagtgccccgcctggggagtacggccgcaaggctaaaactcaaaggaattgacgggggcccgcacaagcagcggagcatgtggcttaattcgaagcaacgcgaagaaccttaccagggcttgacatgcgcatgaagccggggaaactcggtggccgaaaggagtgcgcgcaggtggtgcatggctgtcgtcagctcgtgtcgtgagatgttgggttaagtcccgcaacgagcgcaacccctgtcctgtgttgccagcattcagttggggactcgcaggagactgccggcgtcaagccggaggaaggtggggacgacgtcaagtcatcatgccccttatgccctgggctgcacacgtgctacaatggccggcacaacgggctgctacctggcgacaggaagcgaatcccttaaagccggtcccagttcggatcggaggctgcaacccgcctccgtgaagtcggagttgctagtaatcgcggatcagcatgccgcggtgaatacgttcccgggccttgtacacaccgcccgtcacaccacccgagtcgtctgcacccgaagccgccggccgaacccatttgggacggaggcgtcgaaggtgtggagggtaaggggggtgaagtcgtaacaaggtagccgtaccggaaggtgcggctggatcacct

SEQ ID NO: 116 - DNA, 1529 bp, artificial sequence
  SPC12361_contig000049_3877_5405
tatagagagtttgatcctggctcaggacgaacgctggcggcgtgcttaacacatgcaagtcgaacggagcacccttgactgaggtttcggccaaatgataggaatgcttagtggcggactggtgagtaacgcgtgaggaacctaccttccagagggggacaacagttggaaacgactgctaataccgcatgacgcatgaccggggcatcccgggcatgtcaaagattttatcgctggaagatggcctcgcgtctgattagctagatggtggggtaacagcccaccatggcgacgatcagtagccggactgagaggttgaccggccacattgggactgagatacggcccagactcctacgggaggcagcagtggggaatattgggcaatggacgcaagtctgacccagcaacgccgcgtgaaggaagaaggctttcgggttgtaaacttcttttgtcagggaagagtagaagacggtacctgacgaataagccacggctaactacgtgccagcagccgcggtaatacgtaggtggcaagcgttgtccggatttactgggtgtaaagggcgtgcagccgggccggcaagtcagatgtgaaatctggaggcttaacctccaaactgcatttgaaactgtaggtcttgagtaccggagaggttatcggaattccttgtgtagcggtgaaatgcgtagatataaggaagaacaccagtggcgaaggcggataactggacggcaactgacggtgaggcgcgaaagcgtggggagcaaacaggattagataccctggtagtccacgctgtaaacgatggatactaggtgtgcggggactgaccccctgcgtgccgcagttaacacaataagtatcccacctggggagtacgatcgcaaggttgaaactcaaaggaattgacgggggcccgcacaagcggtggattatgtggtttaattcgaagcaacgcgaagaaccttaccagggcttgacatcctactaacgaagtagagatacatcaggtgcccttcggggaaagtagagacaggtggtgcatggttgtcgtcagctcgtgtcgtgagatgttgggttaagtcccgcaacgagcgcaacccctattgttagttgctacgcaagagcactctagcgagactgccgttgacaaaacggaggaaggtggggacgacgtcaaatcatcatgccccttatgtcctgggctacacacgtaatacaatggcggtcaacagagggaggcaaagccgcgaggcagagcaaacccccaaaagccgtcccagttcggatcgcaggctgcaacccgcctgcgtgaagtcggaatcgctagtaatcgcggatcagcatgccgcggtgaatacgttcccgggccttgtacacaccgcccgtcacaccatgagagtcgggaacacccgaagtccgtagcctaaccgcaaggagggcgcggccgaaggtgggttcgataattggggtgaagtcgtaacaaggtagccgtatcggaaggtgcggctggatcacctccttt

SEQ ID NO: 117 - DNA, 1520 bp, artificial sequence
  SPC11087_contig000087_3616_5135
agagtttgatcctggctcaggatgaacgctggcggcgtgcttaacacatgcaagtcgaacggagcacccctgacggagttttcggacaacgaaagggaatgcttagtggcggacgggtgagtaacgcgtgagtaacctgccttggagtggggaataacagccggaaacggctgctaataccgcatgatgtatctggatcgcatggttctggataccaaagatttatcgctctgagatggactcgcgtctgattagctagttggtgaggtaatggctcaccaaggcgacgatcagtagccggactgagaggttggccggccacattgggactgagacacggcccagactcctacgggaggcagcagtggggaatattgggcaatgggcgaaagcctgacccagcaacgccgcgtgaaggaagaaggccctcgggttgtaaacttcttttgtcagggacgaagcaagtgacggtacctgacgaataagccacggctaactacgtgccagcagccgcggtaatacgtaggtggcaagcgttatccggatttactgggtgtaaagggcgtgtaggcgggagtgcaagtcagatgtgaaaactatgggctcaacccatagcctgcatttgaaactgtacttcttgagtgatggagaggcaggcggaattccctgtgtagcggtgaaatgcgtagatatagggaggaacaccagtggcgaaggcggcctgctggacattaactgacgctgaggcgcgaaagcgtggggagcaaacaggattagataccctggtagtccacgccgtaaacgatggatactaggtgtggggggtctgaccccctccgtgccgcagttaacacaataagtatcccacctggggagtacgatcgcaaggttgaaactcaaaggaattgacgggggcccgcacaagcggtggagtatgtggtttaattcgaagcaacgcgaagaaccttaccaggacttgacatcctactaacgaagcagagatgcataaggtgcccttcggggaaagtagagacaggtggtgcatggttgtcgtcagctcgtgtcgtgagatgttgggttaagtcccgcaacgagcgcaacccttattgttagttgctacgcaagagcactctagcgagactgccgttgacaaaacggaggaaggtggggacgacgtcaaatcatcatgccccttatgtcctgggccacacacgtactacaatggcggtcaacagagggaagcaaagccgcgaggtggagcaaatccctaaaagccgtcccagttcggattgcaggctgaaactcgcctgtatgaagtcggaatcgctagtaatcgcggatcagcatgccgcggtgaatacgttcccgggccttgtacacaccgcccgtcacaccatgagagtcgggaacacccgaagtccgtagcctaacagcaatgggggcgcggccgaaggtgggttcgataattggggtgaagtcgtaacaaggtagccgtatcggaaggtgcggctggatcacct

SEQ ID NO: 118 - DNA, 1500 bp, artificial sequence
  SPC11349_contig000027_38_1537
atttgagagtttgatcctggctcaggatgaacgctggcggcgtgcctaacacatgcaagtcgagcgaacccttcggggtgagcggcggacgggtgagtaacgcgtgggtaacctgccctgtacacacggataacataccgaaaggtatgctaatacgggataacatatgagagtcgcatggcttttgtatcaaagctccggcggtacaggatggacccgcgtctgattagctagttggtaaggtaacggcttaccaaggcaacgatcagtagccgacctgagagggtgatcggccacattggaactgagacacggtccaaactcctacgggaggcagcagtggggaatattgcacaatgggcgaaagcctgatgcagcaacgccgcgtgagcgatgaaggccttcgggtcgtaaagctctgtcctcaaggaagataatgacggtacttgaggaggaagccccggctaactacgtgccagcagccgcggtaatacgtagggggctagcgttatccggaattactgggcgtaaagggtgcgtaggcggtctttcaagccagaagtgaaaggctacggctcaaccgtagtaagcttttggaactgtaggacttgagtgcaggagaggagagtggaattcctagtgtagcggtgaaatgcgtagatattaggaggaacaccagtagcgaaggcggctctctggactgtaactgacgctgaggcacgaaagcgtggggagcaaacaggattagataccctggtagtccacgccgtaaacgatgagtactaggtgtcgggggttacccccctcggtgccgcagctaacgcattaagtactccgcctgggaagtacgctcgcaagagtgaaactcaaaggaattgacggggacccgcacaagtagcggagcatgtggtttaattcgaagcaacgcgaagaaccttacctaagcttgacatcccattgacctctccctaatcggagatttcccttcggggacagtggtgacaggtggtgcatggttgtcgtcagctcgtgtcgtgagatgttgggttaagtcccgcaacgagcgcaacccttgcctttagttgccagcattaagttgggcactctagagggactgccgaggataactcggaggaaggtggggatgacgtcaaatcatcatgccccttatgcttagggctacacacgtgctacaatgggtggtacagagggttgccaagccgtgaggtggagctaatcccttaaagccattctcagttcggattgtaggctgaaactcgcctacatgaagctggagttactagtaatcgcagatcagaatgctgcggtgaatgcgttcccgggtcttgtacacaccgcccgtcacaccatgggagttgggggcgcccgaagccggttagctaaccttttaggaagcggccgtcgaaggtgaaaccaatgactggggtgaagtcgtaacaaggtagccgtatcggaaggtgcggctggatcacctccttt

SEQ ID NO: 119 - DNA, 1222 bp, artificial sequence
  SPC10981_contig000124_25_1246
tgtctcatcatggaaggcgctgaatttacggaaaacattattaatggcgtcgagcgtccggttaaagccgctgaattgttcgcgtttaccttgcgtgtacgcgcaggaaacactgacgttcttactgacgcagaagaaaacgtgcgtcaaaaattacgtgcagaaggagtgatgtaatgtctaaaggtaaaaaacgttctggcgctcgccctggtcgtccgcagccgttgcgaggtactaaaggcaagcgtaaaggcgctcgtctttggtatgtaggtggtcaacaattttaattgcaggggcttcggccccttacttgaggataaattatgtctaatattcaaactggcgccgagcgtatgccgcatgacctttcccatcttggcttccttgctggtcagattggtcgtcttattaccatttcaactactccggttatcgctggcgactccttcgagatggacgccgttggcgctctccgtctttctccattgcgtcgtggccttgctattgactctactgtagacatttttactttttatgtccctcatcgtcacgtttatggtgaacagtggattaagttcatgaaggatggtgttaatgccactcctctcccgactgttaacactactggttatattgaccatgccgcttttcttggcacgattaaccctgataccaataaaatccctaagcatttgtttcagggttatttgaatatctataacaactattttaaagcgccgtggatgcctgaccgtaccgaggctaaccctaatgagcttaatcaagatgatgctcgttatggtttccgttgctgccatctcaaaaacatttggactgctccgcttcctcctgagactgagctttctcgccaaatgacgacttctaccacatctattgacattatgggtctgcaagctgcttatgctaatttgcatactgaccaagaacgtgattacttcatgcagcgttaccatgatgttatttcttcatttggaggtaaaacctcttatgacgctgacaaccgtcctttacttgtcatgcgctctaatctctgggcatctggctatgatgttgatggaactgaccaaacgtcgttaggccagttttctggtcgtgttcaacagacctataaacattctgtgccgcgtttctttgttcctgagcatggcactatgtttactcttgcgcttgttcgttttccgcctactgcgactaa

SEQ ID NO: 120 - DNA, 1493 bp, artificial sequence
  SPC10238_contig000001_257098_258590
agagtttgatcctggctcaggatgaacgctggcggcgtgcctaacacatgcaagtcgagcgattctcttcggagaagagcggcggacgggtgagtaacgcgtgggtaacctgcctcatacacatggataacataccgaaaggtatgctaatacaggataacataagagattcgcatgtttctcttatcaaagctccggcggtatgagatggacccgcgtctgattagctagttggtaaggtaatggcttaccaaggcgacgatcagtagccgacctgagagggtgatcggccacattggaactgagacacggtccaaactcctacgggaggcagcagtggggaatattgcacaatgggcgaaagcctgatgcagcaacgccgcgtgagtgatgaaggccttcgggtcgtaaaactctgtcctcaaggaagataatgacggtacttgaggaggaagccccggctaactacgtgccagcagccgcggtaatacgtagggggctagcgttatccggatttactgggcgtaaagggtgcgtaggtggtttcttaagtcaggagtgaaaggctacggcttaaccgtagtaagctcttgaaactgggaaacttgagtgcaggagaggaaagtggaattcctagtgtagcggtgaaatgcgtagatattaggaggaacaccagtagcgaaggcggctttctggactgtaactgacactgaggcacgaaagcgtggggagcaaacaggattagataccctggtagtccacgccgtaaacgatgagtactaggtgtcgggggttacccccctcggtgccgcagctaacgcattaagtactccgcctggggagtacgctcgcaagagtgaaactcaaaggaattgacggggacccgcacaagtagcggagcatgtggtttaattcgaagcaacgcgaagaaccttacctaagcttgacatccttttgaccgatgcctaatcgcatttttcccttcggggacagaagtgacaggtggtgcatggttgtcgtcagctcgtgtcgtgagatgttgggttaagtcccgcaacgagcgcaacccttgcctttagttgccagcattaagttgggcactctagagggactgccagggataacctggaggaaggtggggatgacgtcaaatcatcatgccccttatgcttagggctacacacgtgctacaatgggtggtacagagggcagccaagtcgtgaggccgagctaatcccttaaagccattctcagttcggattgtaggctgaaactcgcctacatgaagctggagttactagtaatcgcagatcagaatgctgcggtgaatgcgttcccgggtcttgtacacaccgcccgtcacaccacggaagttgggggcgcccgaagccacttagctaacccttttgggaagcgagtgtcgaaggtgaaatcaataactggggtgaagtcgtaacaaggtagccgtatcggaaggtgcggctggatcacct

SEQ ID NO: 121 - DNA, 1493 bp, artificial sequence
  SPC10238_contig000001_3705668_3707160
agagtttgatcctggctcaggatgaacgctggcggcgtgcctaacacatgcaagtcgagcgattctcttcggagaagagcggcggacgggtgagtaacgcgtgggtaacctgcctcatacacatggataacataccgaaaggtatgctaatacaggataacataagagattcgcatgtttctcttatcaaagctccggcggtatgagatggacccgcgtctgattagctagttggtaaggtaatggcttaccaaggcaacgatcagtagccgacctgagagggtgatcggccacattggaactgagacacggtccaaactcctacgggaggcagcagtggggaatattgcacaatgggcgaaagcctgatgcagcaacgccgcgtgagtgatgaaggccttcgggtcgtaaaactctgtcctcaaggaagataatgacggtacttgaggaggaagccccggctaactacgtgccagcagccgcggtaatacgtagggggctagcgttatccggatttactgggcgtaaagggtgcgtaggtggtttcttaagtcaggagtgaaaggctacggcttaaccgtagtaagctcttgaaactgggaaacttgagtgcaggagaggaaagtggaattcctagtgtagcggtgaaatgcgtagatattaggaggaacaccagtagcgaaggcggctttctggactgtaactgacactgaggcacgaaagcgtggggagcaaacaggattagataccctggtagtccacgccgtaaacgatgagtactaggtgtcgggggttacccccctcggtgccgcagctaacgcattaagtactccgcctggggagtacgctcgcaagagtgaaactcaaaggaattgacggggacccgcacaagtagcggagcatgtggtttaattcgaagcaacgcgaagaaccttacctaagcttgacatccttttgaccgatgcctaatcgcatttttcccttcggggacagaagtgacaggtggtgcatggttgtcgtcagctcgtgtcgtgagatgttgggttaagtcccgcaacgagcgcaacccttgcctttagttgccagcattaagttgggcactctagagggactgccagggataacctggaggaaggtggggatgacgtcaaatcatcatgccccttatgcttagggctacacacgtgctacaatgggtggtacagagggcagccaagtcgtgaggccgagctaatcccttaaagccattctcagttcggattgtaggctgaaactcgcctacatgaagctggagttactagtaatcgcagatcagaatgctgcggtgaatgcgttcccgggtcttgtacacaccgcccgtcacaccacggaagttgggggcgcccgaagccacttagctaacccttttgggaagcgagtgtcgaaggtgaaatcaataactggggtgaagtcgtaacaaggtagccgtatcggaaggtgcggctggatcacct

SEQ ID NO: 122 - DNA, 1493 bp, artificial sequence
  SPC10238_contig000001_163373_164865
agagtttgatcctggctcaggatgaacgctggcggcgtgcctaacacatgcaagtcgagcgattctcttcggagaagagcggcggacgggtgagtaacgcgtgggtaacctgcctcatacacatggataacataccgaaaggtatgctaatacaggataacataagagattcgcatgtttctcttatcaaagctccggcggtatgagatggacccgcgtctgattagctagttggtaaggtaatggcttaccaaggcaacgatcagtagccgacctgagagggtgatcggccacattggaactgagacacggtccaaactcctacgggaggcagcagtggggaatattgcacaatgggcgaaagcctgatgcagcaacgccgcgtgagtgatgaaggccttcgggtcgtaaaactctgtcctcaaggaagataatgacggtacttgaggaggaagccccggctaactacgtgccagcagccgcggtaatacgtagggggctagcgttatccggatttactgggcgtaaagggtgcgtaggtggtttcttaagtcaggagtgaaaggctacggcttaaccgtagtaagctcttgaaactgggaaacttgagtgcaggagaggaaagtggaattcctagtgtagcggtgaaatgcgtagatattaggaggaacaccagtagcgaaggcggctttctggactgtaactgacactgaggcacgaaagcgtggggagcaaacaggattagataccctggtagtccacgccgtaaacgatgagtactaggtgtcgggggttacccccctcggtgccgcagctaacgcattaagtactccgcctggggagtacgctcgcaagagtgaaactcaaaggaattgacggggacccgcacaagtagcggagcatgtggtttaattcgaagcaacgcgaagaaccttacctaagcttgacatccttttgatcgatgcctaatcgcatttttcccttcggggacagaagtgacaggtggtgcatggttgtcgtcagctcgtgtcgtgagatgttgggttaagtcccgcaacgagcgcaacccttgcctttagttgccagcattaagttgggcactctagagggactgccagggataacctggaggaaggtggggatgacgtcaaatcatcatgccccttatgcttagggctacacacgtgctacaatgggtggtacagagggcagccaagtcgtgaggccgagctaatcccttaaagccattctcagttcggattgtaggctgaaactcgcctacatgaagctggagttactagtaatcgcagatcagaatgctgcggtgaatgcgttcccgggtcttgtacacaccgcccgtcacaccacggaagttgggggcgcccgaagccacttagctaacccttttgggaagcgagtgtcgaaggtgaaatcaataactggggtgaagtcgtaacaaggtagccgtatcggaaggtgcggctggatcacct

SEQ ID NO: 123 - DNA, 1493 bp, artificial sequence
  SPC10238_contig000001_1145729_1147221
agagtttgatcctggctcaggatgaacgctggcggcgtgcctaacacatgcaagtcgagcgattcacttcggtgaagagcggcggacgggtgagtaacgcgtgggtaacctgcctcatacacatggataacataccgaaaggtatgctaatacaggataacataagagattcgcatgtttctcttatcaaagctccggcggtatgagatggacccgcgtctgattagctagttggtaaggtaatggcttaccaaggcgacgatcagtagccgacctgagagggtgatcggccacattggaactgagacacggtccaaactcctacgggaggcagcagtggggaatattgcacaatgggcgaaagcctgatgcagcaacgccgcgtgagtgatgaaggccttcgggtcgtaaaactctgtcctcaaggaagataatgacggtacttgaggaggaagccccggctaactacgtgccagcagccgcggtaatacgtagggggctagcgttatccggatttactgggcgtaaagggtgcgtaggtggtttcttaagtcaggagtgaaaggctacggcttaaccgtagtaagctcttgaaactgggaaacttgagtgcaggagaggaaagtggaattcctagtgtagcggtgaaatgcgtagatattaggaggaacaccagtagcgaaggcggctttctggactgtaactgacactgaggcacgaaagcgtggggagcaaacaggattagataccctggtagtccacgccgtaaacgatgagtactaggtgtcgggggttacccccctcggtgccgcagctaacgcattaagtactccgcctggggagtacgctcgcaagagtgaaactcaaaggaattgacggggacccgcacaagtagcggagcatgtggtttaattcgaagcaacgcgaagaaccttacctaagcttgacatccttttgaccgatgcctaatcgcatttttcccttcggggacagaagtgacaggtggtgcatggttgtcgtcagctcgtgtcgtgagatgttgggttaagtcccgcaacgagcgcaacccttgcctttagttgccagcattaagttgggcactctagagggactgccagggataacctggaggaaggtggggatgacgtcaaatcatcatgccccttatgcttagggctacacacgtgctacaatgggtggtacagagggcagccaagtcgtgaggccgagctaatcccttaaagccattctcagttcggattgtaggctgaaactcgcctacatgaagctggagttactagtaatcgcagatcagaatgctgcggtgaatgcgttcccgggtcttgtacacaccgcccgtcacaccacggaagttgggggcgcccgaagccacttagctaacccttttgggaagcgagtgtcgaaggtgaaatcaataactggggtgaagtcgtaacaaggtagccgtatcggaaggtgcggctggatcacct

SEQ ID NO: 124 - DNA, 1493 bp, artificial sequence
  SPC10238_contig000001_4119031_4120523
agagtttgatcctggctcaggatgaacgctggcggcgtgcctaacacatgcaagtcgagcgattctcttcggagaagagcggcggacgggtgagtaacgcgtgggtaacctgcctcatacacatggataacataccgaaaggtatgctaatacaggataacataagagattcgcatgtttctcttatcaaagctccggcggtatgagatggacccgcgtctgattagctagttggtaaggtaatggcttaccaaggcgacgatcagtagccgacctgagagggtgatcggccacattggaactgagacacggtccaaactcctacgggaggcagcagtggggaatattgcacaatgggcgaaagcctgatgcagcaacgccgcgtgagtgatgaaggccttcgggtcgtaaaactctgtcctcaaggaagataatgacggtacttgaggaggaagccccggctaactacgtgccagcagccgcggtaatacgtagggggctagcgttatccggatttactgggcgtaaagggtgcgtaggtggtttcttaagtcaggagtgaaaggctacggctcaaccgtagtaagctcttgaaactgggaaacttgagtgcaggagaggaaagtggaattcctagtgtagcggtgaaatgcgtagatattaggaggaacaccagtagcgaaggcggctttctggactgtaactgacactgaggcacgaaagcgtggggagcaaacaggattagataccctggtagtccacgccgtaaacgatgagtactaggtgtcgggggttacccccctcggtgccgcagctaacgcattaagtactccgcctggggagtacgctcgcaagagtgaaactcaaaggaattgacggggacccgcacaagtagcggagcatgtggtttaattcgaagcaacgcgaagaaccttacctaagcttgacatccttttgaccgatgcctaatcgcatttttcccttcggggacagaagtgacaggtggtgcatggttgtcgtcagctcgtgtcgtgagatgttgggttaagtcccgcaacgagcgcaacccttgcctttagttgccagcattaagttgggcactctagagggactgccagggataacctggaggaaggtggggatgacgtcaaatcatcatgccccttatgcttagggctacacacgtgctacaatgggtggtacagagggcagccaagtcgtgaggccgagctaatcccttaaagccattctcagttcggattgtaggctgaaactcgcctacatgaagctggagttactagtaatcgcagatcagaatgctgcggtgaatgcgttcccgggtcttgtacacaccgcccgtcacaccacggaagttgggggcgcccgaagccacttagctaacccttttgggaagcgagtgtcgaaggtgaaatcaataactggggtgaagtcgtaacaaggtagctgtatcggaaggtgcggctggatcacct

SEQ ID NO: 125 - DNA, 1493 bp, artificial sequence
  SPC10238_contig000001_152291_153783
agagtttgatcctggctcaggatgaacgctggcggcgtgcctaacacatgcaagtcgagcgattctcttcggagaagagcggcggacgggtgagtaacgcgtgggtaacctgcctcatacacatggataacataccgaaaggtatgctaatacaggataatataagagattcgcatgtttctcttatcaaagctccggcggtatgagatggacccgcgtctgattagctagttggtaaggtaatggcttaccaaggcgacgatcagtagccgacctgagagggtgatcggccacattggaactgagacacggtccaaactcctacgggaggcagcagtggggaatattgcacaatgggcgaaagcctgatgcagcaacgtcgcgtgagtgatgaaggccttcgggtcgtaaaactctgtcctcaaggaagataatgacggtacttgaggaggaagccccggctaactacgtgccagcagccgcggtaatacgtagggggctagcgttatccggatttactgggcgtaaagggtgcgtaggtggtttcttaagtcaggagtgaaaggctacggcttaaccgtagtaagctcttgaaactgggaaacttgagtgcaggagaggaaagtggaattcctagtgtagcggtgaaatgcgtagatattaggaggaacaccagtagcgaaggcggctttctggactgtaactgacactgaggcacgaaagcgtggggagcaaacaggattagataccctggtagtccacgccgtaaacgatgagtactaggtgtcgggggttacccccctcggtgccgcagctaacgcattaagtactccgcctggggagtacgctcgcaagagtgaaactcaaaggaattgacggggacccgcacaagtagcggagcatgtggtttaattcgaagcaacgcgaagaaccttacctaagcttgacatccttttgaccgatgcctaatcgcatttttcccttcggggacagaagtgacaggtggtgcatggttgtcgtcagctcgtgtcgtgagatgttgggttaagtcccgcaacgagcgcaacccttgcctttagttgccagcattaagttgggcactctagagggactgccagggataacctggaggaaggtggggatgacgtcaaatcatcatgccccttatgcttagggctacacacgtgctacaatgggtggtacagagggcagccaagtcgtgaggccgagctaatcccttaaagccattctcagttcggattgtaggctgaaactcgcctacatgaagctggagttactagtaatcgcagatcagaatgctgcggtgaatgcgttcccgggtcttgtacacaccgcccgtcacaccacggaagttgggggcgcccgaagccacttagctaacccttttgggaagcgagtgtcgaaggtgaaatcaataactggggtgaagtcgtaacaaggtagccgtatcggaaggtgcggctggatcacct

SEQ ID NO: 126 - DNA, 1493 bp, artificial sequence
  SPC10238_contig000001_9408_10900
agagtttgatcctggctcaggatgaacgctggcggcgtgcctaacacatgcaagtcgagcgattctcttcggagaagagcggcggacgggtgagtaacgcgtgggtaacctgcctcatacacatggataacataccgaaaggtatgctaatacaggataacataagagattcgcatgtttctcttatcaaagctccggcggtatgagatggacccgcgtctgattagctagttggtaaggtaatggcttaccaaggcgacgatcagtagccgacctgagagggtgatcggccacattggaactgagacacggtccaaactcctacgggaggcagcagtggggaatattgcacaatgggcgaaagcctgatgcagcaacgccgcgtgagtgatgaaggccttcgggtcgtaaaactctgtcctcaaggaagataatgacggtacttgaggaggaagccccggctaactacgtgccagcagccgcggtaatacgtagggggctagcgttatccggatttactgggcgtaaagggtgcgtaggtggtttcttaagtcaggagtgaaaggctacggcttaaccgtagtaagctcttgaaactgggaaacttgagtgcaggagaggaaagtggaattcctagtgtagcggtgaaatgcgtagatattaggaggaacaccagtagcgaaggcggctttctggactgtaactgacactgaggcacgaaagcgtggggagcaaacaggattagataccctggtagtccacgccgtaaacgatgagtactaggtgtcgggggttacccccctcggtgccgcagctaacgcattaagtactccgcctggggagtacgctcgcaagagtgaaactcaaaggaattgacggggacccgcacaagtagcggagcatgtggtttaattcgaagcaacgcgaagaaccttacctaagcttgacatccttttgaccgatgcctaatcgcatttttcccttcggggacagaagtgacaggtggtgcatggttgtcgtcagctcgtgtcgtgagatgttgggttaagtcccgcaacgagcgcaacccttgcctttagttgccaccattaagttgggcactctagagggactgccagggataacctggaggaaggtggggatgacgtcaaatcatcatgccccttatgcttagggctacacacgtgctacaatgggtggtacagagggcagccaagtcgtgaggccgagctaatcccttaaagccattctcagttcggattgtaggctgaaactcgcctacatgaagctggagttactagtaatcgcagatcagaatgctgcggtgaatgcgttcccgggtcttgtacacaccgcccgtcacaccacggaagttgggggcgcccgaagccacttagctaacccttttgggaagcgagtgtcgaaggtgaaatcaataactggggtgaagtcgtaacaaggtagccgtatcggaaggtgcggctggatcacct

SEQ ID NO: 127 - DNA, 1493 bp, artificial sequence; identical to SEQ ID NO: 120
  SPC10238_contig000001_4125835_4127327

SEQ ID NO: 128 - DNA, 1493 bp, artificial sequence; identical to SEQ ID NO: 120
  SPC10238_contig000001_244488_245980

SEQ ID NO: 129 - DNA, 1493 bp, artificial sequence; identical to SEQ ID NO: 120
  SPC10238_contig000001_136397_137889

SEQ ID NO: 130 - DNA, 1493 bp, artificial sequence
  SPC10238_contig000001_4008480_4009972
agagtttgatcctggctcaggatgaacgctggcggcgtgcctaacacatgcaagtcgagcgattctcttcggagaagagcggcggacgggtgagtaacgcgtgggtaacctgcctcatacacatggataacataccgaaaggtatgctaatacaggataacataagagattcgcatgtttctcttatcaaagctccggcggtatgagatggacccgcgtctgattagctagttggtaaggtaatggcttaccaaggcgacgatcagtagccgacctgagagggtgatcggccacattggaactgagacacggtccaaactcctacgggaggcagcagtggggaatattgcacaatgggcgaaagcctgatgcagcaacgccgcgtgagtgatgaaggccttcgggtcgtaaaactctgtcctcaaggaagataatgacggtacttgaggaggaagccccggctaactacgtgccagcagccgcggtaatacgtagggggctagcgttatccggatttactgggcgtaaagggtgcgtaggtggtttcttaagtcaggagtgaaaggctacggctcaaccgtagtaagctcttgaaactgggaaacttgagtgcaggagaggaaagtggaattcctagtgtagcggtgaaatgcgtagatattaggaggaacaccagtagcgaaggcggctttctggactgtaactgacactgaggcacgaaagcgtggggagcaaacaggattagataccctggtagtccacgccgtaaacgatgagtactaggtgtcgggggttacccccctcggtgccgcagctaacgcattaagtactccgcctggggagtacgctcgcaagagtgaaactcaaaggaattgacggggacccgcacaagtagcggagcatgtggtttaattcgaagcaacgcgaagaaccttacctaagcttgacatccttttgaccgatgcctaatcgcatttttcccttcggggacagaagtgacaggtggtgcatggttgtcgtcagctcgtgtcgtgagatgttgggttaagtcccgcaacgagcgcaacccttgcctttagttgccagcattaagttgggcactctagagggactgccagggataacctggaggaaggtggggatgacgtcaaatcatcatgccccttatgcttagggctacacacgtgctacaatgggtggtacagagggcagccaagtcgtgaggccgagctaatcccttaaagccattctcagttcggattgtaggctgaaactcgcctacatgaagctggagttactagtaatcgcagatcagaatgctgcggtgaatgcgttcccgggtcttgtacacaccgcccgtcacaccacggaagttgggggcgcccgaagccacttagctaacccttttgggaagcgagtgtcgaaggtgaaatcaataactggggtgaagtcgtaacaaggtagccgtatcggaaggtgcggctggatcacct

SEQ ID NO: 131 - DNA, 1493 bp, artificial sequence
  SPC10238_contig000001_250978_252470
agagtttgatcctggctcaggatgaacgctggcggcgtgcctaacacatgcaagtcgagcgattctcttcggagaagagcggcggacgggtgagtaacgcgtgggtaacctgcctcatacacatggataacataccgaaaggtatgctaatacaggataacataagagattcgcatgtttctcttatcaaagctccggcggtatgagatggacccgcgtctgattagctagttggtaaggtaatggcttaccaaggcgacgatcagtagccgacctgagagggtgatcggccacattggaactgagacacggtccaaactcctacgggaggcagcagtggggaatattgcacaatgggcgaaagcctgatgcagcaacgccgcgtgagtgatgaaggccttcgggtcgtaaaactctgtcctcaaggaagataatgacggtacttgaggaggaagccccggctaactacgtgccagcagccgcggtaatacgtagggggctagcgttatccggatttactgggcgtaaagggtgcgtaggtggtttcttaagtcaggagtgaaagactacggcttaaccgtagtaagctcttgaaactgggaaacttgagtgcaggagaggaaagtggaattcctagtgtagcggtgaaatgcgtagatattaggaggaacaccagtagcgaaggcggctttctggactgtaactgacactgaggcacgaaagcgtggggagcaaacaggattagataccctggtagtccacgccgtaaacgatgagtactaggtgtcgggggttacccccctcggtgccgcagctaacgcattaagtactccgcctggggagtacgctcgcaagagtgaaactcaaaggaattgacggggacccgcacaagtagcggagcatgtggtttaattcgaagcaacgcgaagaaccttacctaagcttgacatccttttgaccgatgcctaatcgcatttttcccttcggggacagaagtgacaggtggtgcatggttgtcgtcagctcgtgtcgtgagatgttgggttaagtcccgcaacgagcgcaacccttgcctttagttgccagcattaagttgggcactctagagggactgccagggataacctggaggaaggtggggatgacgtcaaatcatcatgccccttatgcttagggctacacacgtgctacaatgggtggtacagagggcagccaagtcgtgaggccgagctaatcccttaaagccattctcagttcggattgtaggctgaaactcgcctacatgaagctggagttactagtaatcgcagatcagaatgctgcggtgaatgcgttcccgggtcttgtacacaccgcccgtcacaccacggaagttgggggcgcccgaagccacttagctaacccttttgggaagcgagtgtcgaaggtgaaatcaataactggggtgaagtcgtaacaaggtagccgtatcggaaggtgcggctggatcacct

SEQ ID NO: 132 - DNA, 1521 bp, artificial sequence
  SPC10987_contig000001_289767_291287
agagtttgatcctggctcaggatgaacgctggcggcgtgcttaacacatgcaagtcgagcgaagcgctttacttagatttcttcggattgaagagttttgcgactgagcggcggacgggtgagtaacgcgtgggtaacctgcctcatacagggggataacagttagaaatgactgctaataccgcataagaccacagtaccgcatggtaccgtgggaaaaactccggtggtatgagatggacccgcgtctgattagctagttggtaaggtaacggcttaccaaggcgacgatcagtagccgacctgagagggtgaccggccacattgggactgagacacggcccaaactcctacgggaggcagcagtggggaatattgcacaatgggggaaaccctgatgcagcgacgccgcgtgaaggatgaagtatttcggtatgtaaacttctatcagcagggaagaaaatgacggtacctgactaagaagccccggctaactacgtgccagcagccgcggtaatacgtagggggcaagcgttatccggatttactgggtgtaaagggagcgtagacggttatgtaagtctgatgtgaaaacccggggctcaaccccgggactgcattggaaactatgtaactagagtgtcggagaggtaagtggaattcctagtgtagcggtgaaatgcgtagatattaggaggaacaccagtggcgaaggcggcttactggacgatgactgacgttgaggctcgaaagcgtggggagcaaacaggattagataccctggtagtccacgccgtaaacgatgcatactaggtgtcgggtggcaaagccattcggtgccgcagcaaacgcaataagtatgccacctggggagtacgttcgcaagaatgaaactcaaaggaattgacggggacccgcacaagcggtggagcatgtggtttaattcgaagcaacgcgaagaaccttacctgctcttgacatccccctgaccggcgcgtaatggtgcctttccttcgggacaggggagacaggtggtgcatggttgtcgtcagctcgtgtcgtgagatgttgggttaagtcccgcaacgagcgcaacccttatctttagtagccagcggttcggccgggcactctagagagactgccagggataacctggaggaaggtggggatgacgtcaaatcatcatgccccttatgagcagggctacacacgtgctacaatggcgtaaacaaagggaggcgaagccgcgaggtggagcaaatcccaaaaataacgtctcagttcggattgtagtctgcaactcgactacatgaagctggaatcgctagtaatcgcgaatcagaatgtcgcggtgaatacgttcccgggtcttgtacacaccgcccgtcacaccatgggagttggtaacgcccgaagtcagtgacccaaccgtaaggagggagctgccgaaggtgggaccgataactggggtgaagtcgtaacaaggtagccgtatcggaaggtgcggctggatcacct

SEQ ID NO: 133 - DNA, 1521 bp, artificial sequence
  SPC10987_contig000001_3915138_3916658
agagtttgatcctggctcaggatgaacgctggcggcgtgcttaacacatgcaagtcgagcgaagcgctttacttagatttcttcggattgaagagttttgcgactgagcggcggacgggtgagtaacgcgtgggtaacctgcctcatacagggggacaacagttagaaatgactgctaataccgcataagaccacggtaccgcatggtacagtgggaaaaactccggtggtatgagatggacccgcgtctgattagctagttggtaaggtaacggcttaccaaggcgacgatcagtagccgacctgagagggtgaccggccacattgggactgagacacggcccaaactcctacgggaggcagcagtggggaatattgcacaatgggggaaaccctgatgcagcgacgccgcgtgaaggatgaagtatttcggtatgtaaacttctatcagcagggaagaaaatgacggtacctgactaagaagccccggctaactacgtgccagcagccgcggtaatacgtagggggcaagcgttatccggatttactgggtgtaaagggagcgtagacggttatgtaagtctgatgtgaaaacccggggctcaaccccgggactgcattggaaactatgtaactagagtgtcggagaggtaagtggaattcctagtgtagcggtgaaatgcgtagatattaggaggaacaccagtggcgaaggcggcttactggacgatgactgacgttgaggctcgaaagcgtggggagcaaacaggattagataccctggtagtccacgccgtaaacgatgcatactaggtgtcgggtggcaaagccattcggtgccgcagcaaacgcaataagtatgccacctggggagtacgttcgcaagaatgaaactcaaaggaattgacggggacccgcacaagcggtggagcatgtggtttaattcgaagcaacgcgaagaaccttacctgctcttgacatccccctgaccggcgcgtaatggtgcctttccttcgggacaggggagacaggtggtgcatggttgtcgtcagctcgtgtcgtgagatgttgggttaagtcccgcaacgagcgcaacccttatctttagtagccagcggttcggccgggcactctagagagactgccagggataacctggaggaaggtggggatgacgtcaaatcatcatgccccttatgagcagggctacacacgtgctacaatggcgtaaacaaagggaggcgaagccgcgaggtggagcaaatcccaaaaataacgtctcagttcggattgtagtctgcaactcgactacatgaagctggaatcgctagtaatcgcgaatcagaatgtcgcggtgaatacgttcccgggtcttgtacacaccgcccgtcacaccatgggagttggtaacgcccgaagtcagtgacccaaccgtaaggagggagctgccgaaggtgggaccgataactggggtgaagtcgtaacaaggtagccgtatcggaaggtgcggctggatcacct

SEQ ID NO: 134 - DNA, 1521 bp, artificial sequence
  SPC10987_contig000001_3927984_3929504
agagtttgatcctggctcaggatgaacgctggcggcgtgcttaacacatgcaagtcgagcgaagcgctttacttagatttcttcggattgaagagttttgcgactgagcggcggacgggtgagtaacgcgtgggtaacctgcctcatacagggggataacagttagaaatgactgctaataccgcataagaccacggtaccgcatggtacagtgggaaaaactccggtggtatgagatggacccgcgtctgattagctagttggtaaggtaacggcttaccaaggcgacgatcagtagccgacctgagagggtgaccggccacattgggactgagacacggcccaaactcctacgggaggcagcagtggggaatattgcacaatgggggaaaccctgatgcagcgacgccgcgtgaaggatgaagtatttcggtatgtaaacttctatcagcagggaagaaaatgacggtacctgactaagaagccccggctaactacgtgccagcagccgcggtaatacgtagggggcaagcgttatccggatttactgggtgtaaagggagcgtagacggttatgtaagtctgatgtgaaaacccggggctcaaccccgggactgcattggaaactatgtaactagagtgtcggagaggtaagtggaattcctagtgtagcggtgaaatgcgtagatattaggaggaacaccagtggcgaaggcggcttactggacgatgactgacgttgaggctcgaaagcgtggggagcaaacaggattagataccctggtagtccacgccgtaaacgatgcatactaggtgtcgggtggcaaagccattcggtgccgcagcaaacgcaataagtatgccacctggggagtacgttcgcaagaatgaaactcaaaggaattgacggggacccgcacaagcggtggagcatgtggtttaattcgaagcaacgcgaagaaccttacctgctcttgacatccccctgaccggcgcgtaatggtgcctttccttcgggacaggggagacaggtggtgcatggttgtcgtcagctcgtgtcgtgagatgttgggttaagtcccgcaacgagcgcaacccttatctttagtagccagcggttcggccgggcactctagagagactgccagggataacctggaggaaggtggggatgacgtcaaatcatcatgccccttatgagcagggctacacacgtgctacaatggcgtaaacaaagggaggcgaagccgcgaggtggagcaaatcccaaaaataacgtctcagttcggattgtagtctgcaactcgactacatgaagctggaatcgctagtaatcgcgaatcagaatgtcgcggtgaatacgttcccgggtcttgtacacaccgcccgtcacaccatgggagttggtaacgcccgaagtcagtgacccaaccgtaaggagggagctgccgaaggtgggaccgataactggggtgaagtcgtaacaaggtagccgtatcggaaggtgcggctggatcacct

SEQ ID NO: 135 - DNA, 1521 bp, artificial sequence
  SPC10987_contig000001_4550032_4551552
agagtttgatcctggctcaggatgaacgctggcggcgtgcttaacacatgcaagtcgagcgaagcactttacttagatttcttcggaatgaagagtgttgtgactgagcggcggacgggtgagtaacgcgtgggtaacctgcctcatacagggggataacagttagaaatgactgctaataccgcataagaccacggtaccgcatggtacagtgggaaaaactccggtggtatgagatggacccgcgtctgattagctagttggtaaggtaacggcttaccaaggcgacgatcagtagccgacctgagagggtgaccggccacattgggactgagacacggcccaaactcctacgggaggcagcagtggggaatattgcacaatgggggaaaccctgatgcagcgacgccgcgtgaaggatgaagtatttcggtatgtaaacttctatcagcagggaagaaaatgacggtacctgactaagaagccccggctaactacgtgccagcagccgcggtaatacgtagggggcaagcgttatccggatttactgggtgtaaagggagcgtagacggttatgtaagtctgatgtgaaaacccggggctcaaccccgggactgcattggaaactatgtaactagagtgtcggagaggtaagtggaattcctagtgtagcggtgaaatgcgtagatattaggaggaacaccagtggcgaaggcggcttactggacgatgactgacgttgaggctcgaaagcgtggggagcaaacaggattagataccctggtagtccacgccgtaaacgatgcatactaggtgtcgggtggcaaagccattcggtgccgcagcaaacgcaataagtatgccacctggggagtacgttcgcaagaatgaaactcaaaggaattgacggggacccgcacaagcggtggagcatgtggtttaattcgaagcaacgcgaagaaccttacctgctcttgacatccccctgaccggcgcgtaatggtgcctttccttcgggacaggggagacaggtggtgcatggttgtcgtcagctcgtgtcgtgagatgttgggttaagtcccgcaacgagcgcaacccttatctttagtagccagcggttcggccgggcactctagagagactgccagggataacctggaggaaggtggggatgacgtcaaatcatcatgccccttatgagcagggctacacacgtgctacaatggcgtaaacaaagggaggcgaagccgcgaggtggagcaaatcccaaaaataacgtctcagttcggattgtagtctgcaactcgactacatgaagctggaatcgctagtaatcgcgaatcagaatgtcgcggtgaatacgttcccgggtcttgtacacaccgcccgtcacaccatgggagttggtaacgcccgaagtcagtgacccaaccgtaaggagggagctgccgaaggtgggaccgataactggggtgaagtcgtaacaaggtagccgtatcggaaggtgcggctggatcacct

SEQ ID NO: 136 - DNA, 1515 bp, artificial sequence
  SPC10298_contig000063_1456_2970
agggttcgattctggctcaggatgaacgctggcggcgtgcttaacacatgcaagtcgaacgggatccatcaggctttgcttggtggtgagagtggcgaacgggtgagtaatgcgtgaccgacctgccccatacaccggaatagctcctggaaacgggtggtaatgccggatgctccggcctgccgcatggtgggctgggaaagattgtatcggtatgggatggggtcgcgtcctatcaggtagtcggcggggtaacggcccaccgagcctacgacgggtagccggcctgagagggcgaccggccacattgggactgagatacggcccagactcctacgggaggcagcagtggggaatattgcacaatgggcgcaagcctgatgcagcgacgccgcgtgcgggatgacggccttcgggttgtaaaccgcttttgatcgggagcaagccttcgggtgagtgtacctttcgaataagcaccggctaactacgtgccagcagccgcggtaatacgtagggtgcaagcgttatccggaattattgggcgtaaagggctcgtaggcggttcgtcgcgtccggtgtgaaagtccatcgcttaacggtggatctgcgccgggtacgggcgggctggagtgcggtaggggagactggaattcccggtgtaacggtggaatgtgtagatatcgggaagaacaccaatggcgaaggcaggtctctgggccgttactgacgctgaggagcgaaagcgtggggagcgaacaggattagataccctggtagtccacgccgtaaacggtggatgctggatgtggggcccgttccacgggttccgtgtcggagctaacgcgttaagcatcccgcctggggagtacggccgcaaggctaaaactcaaagaaattgacgggggcccgcacaagcggcggagcatgcggattaattcgatgcaacgcgaagaaccttacctgggcttgacatgttcccgaccgctccagagatggggcttcccttcggggcgggttcacaggtggtgcatggtcgtcgtcagctcgtgtcgtgagatgttgggttaagtcccgcaacgagcgcaaccctcgccctgtgttgccagcacgtcatggtgggaactcacgggggaccgccggggtcaactcggaggaaggtggggatgacgtcagatcatcatgccccttacgtccagggcttcacgcatgctacaatggccggtacaacgggatgcgacacggcgacgtggagcggatccctgaaaaccggtctcagttcggattggagtctgcaacccgactccatgaaggcggagtcgctagtaatcgcggatcagcaacgccgcggtgaatgcgttcccgggccttgtacacaccgcccgtcaagtcatgaaagtgggtagcacccgaagccggtggcctaacctttttggatggagccgtctaaggtgagactcgtgattgggactaagtcgtaacaaggtagccgtaccggaaggtgcggctggatcacct

SEQ ID NO: 137 - DNA, 1504 bp, artificial sequence
  SPC10155_contig000001_3767013_3768516
agagtttgatcctggctcaggacgaacgctggcggcgtgcctaacacatgcaagtcgagcgagaggagttccttcgggaacaaatctagcggcggacgggtgagtaacacgtgggcaacctgccttgtagaggggaatagccttccgaaaggaagattaataccgcataacattacattttcgcatgaagaagtaattaaaggagcaatccgctacaagatgggcccgcggcgcattagctagttggtgaggtaacggctcaccaaggcgacgatgcgtagccgacctgagagggtgatcggccacattgggactgagacacggcccagactcctacgggaggcagcagtggggaatattgcacaatgggggaaaccctgatgcagcaacgccgcgtgagtgatgaaggttttcggatcgtaaagctctgtcttcagggacgataatgacggtacctgaggaggaagccacggctaactacgtgccagcagccgcggtaatacgtaggtggcgagcgttgtccggatttactgggcgtaaagggagcgtaggcggatttttaagtgagatgtgaaatacccgggctcaacttgggtgctgcatttcaaactggaagtctagagtgcaggagaggagagtggaattcctagtgtagcggtgaaatgcgtagagattaggaagaacaccagtggcgaaggcgactctctggactgtaactgacgctgaggctcgaaagcgtggggagcaaacaggattagataccctggtagtccacgccgtaaacgatgaatactaggtgtaggggttgtcatgacctctgtgccgccgcaaacgcattaagtattccgcctggggagtacggtcgcaagattaaaactcaaaggaattgacgggggcccgcacaagcagcggagcatgtggtttaattcgaagcaacgcgaagaaccttacctagacttgacatctcctgcattactcttaatcgaggaagtcccttcggggacaggatgacaggtggtgcatggttgtcgtcagctcgtgtcgtgagatgttgggttaagtcccgcaacgagcgcaacccttattgttagttgctaccatttagttgagcactctagcgagactgcccgggttaaccgggaggaaggtggggatgacgtcaaatcatcatgccccttatgtctagggctacacacgtgctacaatggcaagtacaaagagatgcgataccgcgaggtggagctaaactataaaacttgtctcagttcggattgtaggctgaaactcgcctacatgaagctggagttgctagtaatcgcgaatcagaatgtcgcggtgaatacgttcccgggccttgtacacaccgcccgtcacaccatgagagttggcaatacccaaagttcgtgagctaacccgtaagggaggcagcgacctaaggtagggtcagcgattggggtgaagtcgtaacaaggtagccgtaggagaacctgcggctggatcacct

SEQ ID NO: 138 - DNA, 1504 bp, artificial sequence
  SPC10155_contig000001_3732405_3733908
agagtttgatcctggctcaggacgaacgctggcggcgtgcctaacacatgcaagtcgagcgagaggagttccttcgggaacaaatctagcggcggacgggtgagtaacacgtgggcaacctgccttgtagaggggaatagccttccgaaaggaagattaataccgcataatattacattttcgcatgaagaagtaattaaaggagcaatccgctacaagatgggcccgcggcgcattagctagttggtgaggtaacggctcaccaaggcgacgatgcgtagccgacctgagagggtgatcggccacattgggactgagacacggcccagactcctacgggaggcagcagtggggaatattgcacaatggggggaaccctgatgcagcaacgccgcgtgagtgatgaaggttttcggatcgtaaagctctgtcttcagggacgataatgacggtacctgaggaggaagccacggctaactacgtgccagcagccgcggtaatacgtaggtggcgagcgttgtccggatttactgggcgtaaagggagcgtaggcggatttttaagtgagatgtgaaatacccgggctcaacttgggtgctgcatttcaaactggaagtctagagtgcaggagaggagagtggaattcctagtgtagcggtgaaatgcgtagagattaggaagaacaccagtggcgaaggcgactctctggactgtaactgacgctgaggctcgaaagcgtggggagcaaacaggattagataccctggtagtccacgccgtaaacgatgaatactaggtgtaggggttgtcatgacctctgtgccgccgcaaacgcattaagtattccgcctggggagtacggtcgcaagattaaaactcaaaggaattgacgggggcccgcacaagcagcggagcatgtggtttaattcgaagcaacgcgaagaaccttacctagacttgacatctcctgcattactcttaatcgaggaagtcccttcggggacaggatgacaggtggtgcatggttgtcgtcagctcgtgtcgtgagatgttgggttaagtcccgcaacgagcgcaacccttattgttagttgctaccatttagttgagcactctagcgagactgcccgggttaaccgggaggaaggtggggatgacgtcaaatcatcatgccccttatgtctagggctacacacgtgctacaatggcaagtacaaagagatgcgataccgcgaggtggagctaaactataaaacttgtctcagttcggattgtaggctgaaactcgcctacatgaagctggagttgctagtaatcgcgaatcagaatgtcgcggtgaatacgttcccgggccttgtacacaccgcccgtcacaccatgagagttggcaatacccaaagttcgtgagctaacccgtaagggaggcagcgacctaaggtagggtcagcgattggggtgaagtcgtaacaaggtagccgtaggagaacctgcggctggatcacct

SEQ ID NO: 139 - DNA, 1504 bp, artificial sequence; identical to SEQ ID NO: 137
  SPC10155_contig000001_3898283_3899786

SEQ ID NO: 140 - DNA, 1504 bp, artificial sequence; identical to SEQ ID NO: 137
  SPC10155_contig000001_3576937_3578440

SEQ ID NO: 141 - DNA, 1504 bp, artificial sequence; identical to SEQ ID NO: 137
  SPC10155_contig000001_3723510_3725013

SEQ ID NO: 142 - DNA, 1504 bp, artificial sequence; identical to SEQ ID NO: 137
  SPC10155_contig000001_3582542_3584045

SEQ ID NO: 143 - DNA, 1504 bp, artificial sequence; identical to SEQ ID NO: 138
  SPC10155_contig000001_3742972_3744475

SEQ ID NO: 144 - DNA, 1504 bp, artificial sequence; identical to SEQ ID NO: 137
  SPC10155_contig000001_3707915_3709418

SEQ ID NO: 145 - DNA, 1504 bp, artificial sequence; identical to SEQ ID NO: 137
  SPC10155_contig000001_3345069_3346572

SEQ ID NO: 146 - DNA, 1504 bp, artificial sequence
  SPC10155_contig000001_3748710_3750213
agagtttgatcctggctcaggacgaacgctggcggcgtgcctaacacatgcaagtcgagcgagaggagttccttcgggaacaaatctagcggcggacgggtgagtaacacgtgggcaacctgccttgtagaggggaatagccttccgaaaggaagattaataccgcataatattacattttcgcatgaagaagtaattaaaggagcaatccgctacaagatgggcccgcggcgcattagctagttggtgaggtaacggctcaccaaggcgacgatgcgtagccgacctgagagggtgatcggccacattgggactgagacacggcccagactcctacgggaggcagcagtggggaatattgcacaatgggggaaaccctgatgcagcaacgccgcgtgagtgatgaaggttttcggatcgtaaagctctgtcttcagggacgataatgacggtacctgaggaggaagccacggctaactacgtgccagcagccgcggtaatacgtaggtggcgagcgttgtccggatttactgggcgtaaagggagcgtaggcggatttttaagtgagatgtgaaatacccgggctcaacttgggtgctgcatttcaaactggaagtctagagtgcaggagaggagagtggaattcctagtgtagcggtgaaatgcgtagagattaggaagaacaccagtggcgaaggcgactctctggactgtaactgacgctgaggctcgaaagcgtggggagcaaacaggattagataccctggtagtccacgccgtaaacgatgaatactaggtgtaggggttgtcatgacctctgtgccgccgcaaacgcattaagtattccgcctggggagtacggtcgcaagattaaaactcaaaggaattgacgggggcccgcacaagcagcggagcatgtggtttaattcgaagcaacgcgaagaaccttacctagacttgacatctcctgcattactcttaatcgaggaagtcccttcggggacaggatgacaggtggtgcatggttgtcgtcagctcgtgtcgtgagatgttgggttaagtcccgcaacgagcgcaacccttattgttagttgctaccatttagttgagcactctagcgagactgcccgggttaaccgggaggaaggtggggatgacgtcaaatcatcatgccccttatgtctagggctacacacgtgctacaatggcaagtacaaagagatgcgataccgcgaggtggagctaaactataaaacttgtctcagttcggattgtaggctgaaactcgcctacatgaagctggagttgctagtaatcgcgaatcagaatgtcgcggtgaatacgttcccgggccttgtacacaccgcccgtcacaccatgagagttggcaatacccaaagttcgtgagctaacccgtaagggaggcagcgacctaaggtagggtcagcgattggggtgaagtcgtaacaaggtagccgtaggagaacctgcggctggatcacct

SEQ ID NO: 147 - DNA, 1524 bp, artificial sequence
  SPC12282_contig000074_165_1688
agagtttgatcctggctcaggatgaacgctggcggcgtgcttaacacatgcaagtcgaacgaagcataaggaacggattatttcggtaagaagtactttatgactgagtggcggacgggtgagtaacgcgtggataacctgcctcatacagggggataacagttagaaatgactgctaataccgcataagcgcacagtgctgcatggcacagtgtgaaaagctccggcggtatgagatggatccgcgtttgattagctagttggtggggtaaaggcctaccaaggcgacgatcaatagccgacctgagagggtgaccggccacattgggactgagacacggcccaaactcctacgggaggcagcagtggggaatattgcacaatgggggaaaccctgatgcagcgacgccgcgtgaaggaagaagtatttcggtatgtaaacttctatcagcagggaagaaaatgacggtacctgactaagaagccccggctaattacgtgccagcagccgcggtaatacgtaaggggcaagcgttatccggatttactgggtgtaaagggagcgtagacggcagtgcaagtctgatgtgaaagcccggggctcaaccccgggactgcattggaaactgtgcagctagagtgtcggagaggtaagtggaattcctagtgtagcggtgaaatgcgtagatattaggaggaacaccagtggcgaaggcggcttactggacgataactgacgttgaggctcgaaagcgtggggagcaaacaggattagataccctggtagtccacgccgtaaacgatgaatactaggtgtcgggcgccaaaggcgttcggtgccgcagcaaacgcaataagtattccacctggggagtacgttcgcaagaatgaaactcaaaggaattgacggggacccgcacaagcggtggagcatgtggtttaattcgaagcaacgcgaagaaccttaccaagtcttgacatctgcctgaccggtccgtaacaggacccttccttcgggacaggcaagacaggtggtgcatggttgtcgtcagctcgtgtcgtgagatgttgggttaagtcccgcaacgagcgcaacccttatccttagtagccagcaggtagagctgggcactctagggagactgccagggacaacctggaggaaggtggggatgacgtcaaatcatcatgccccttatgatttgggctacacacgtgctacaatggcgtaaacaaagggaggcgaaggggtgacctggagcaaatcccaaaaataacgtctcagttcggattgtagtctgcaactcgactacatgaagctggaatcgctagtaatcgcgaatcagaatgtcgcggtgaatacgttcccgggtcttgtacacaccgcccgtcacaccatgggagtcggatatgcccgaagccggtgaccgaacccgaaagggaaggagccgtcgaaggtggagccgataactggggtgaagtcgtaacaaggtagccgtatcggaaggtgcggctggatcacct

SEQ ID NO: 148 - DNA, 1520 bp, artificial sequence
  SPC10358_contig000001_444754_446273
agagtttgatcctggctcaggatgaacgctggcggcgtgcttaacacatgcaagtcgaacggggtgctcatgacggaggattcgtccaacggattgagttacctagtggcggacgggtgagtaacgcgtgaggaacctgccttggagaggggaataacactccgaaaggagtgctaataccgcatgatgcagttgggtcgcatggctctgactgccaaagatttatcgctctgagatggcctcgcgtctgattagctagtaggcggggtaacggcccacctaggcgacgatcagtagccggactgagaggttgaccggccacattgggactgagacacggcccagactcctacgggaggcagcagtggggaatattgggcaatgggcgcaagcctgacccagcaacgccgcgtgaaggaagaaggctttcgggttgtaaacttcttttgtcggggacgaaacaaatgacggtacccgacgaataagccacggctaactacgtgccagcagccgcggtaatacgtaggtggcaagcgttatccggatttactgggtgtaaagggcgtgtaggcgggattgcaagtcagatgtgaaaactgggggctcaacctccagcctgcatttgaaactgtagttcttgagtgctggagaggcaatcggaattccgtgtgtagcggtgaaatgcgtagatatacggaggaacaccagtggcgaaggcggattgctggacagtaactgacgctgaggcgcgaaagcgtggggagcaaacaggattagataccctggtagtccacgccgtaaacgatggatactaggtgtggggggtctgaccccctccgtgccgcagttaacacaataagtatcccacctggggagtacgatcgcaaggttgaaactcaaaggaattgacgggggcccgcacaagcggtggagtatgtggtttaattcgaagcaacgcgaagaaccttaccagggcttgacatcccactaacgaagcagagatgcattaggtgcccttcggggaaagtggagacaggtggtgcatggttgtcgtcagctcgtgtcgtgagatgttgggttaagtcccgcaacgagcgcaacccttattgttagttgctacgcaagagcactctagcgagactgccgttgacaaaacggaggaaggtggggacgacgtcaaatcatcatgccccttatgtcctgggccacacacgtactacaatggtggttaacagagggaggcaataccgcgaggtggagcaaatccctaaaagccatcccagttcggattgcaggctgaaacccgcctgtatgaagttggaatcgctagtaatcgcggatcagcatgccgcggtgaatacgttcccgggccttgtacacaccgcccgtcacaccatgagagtcgggaacacccgaagtccgtagcctaaccgcaaggagggcgcggccgaaggtgggttcgataattggggtgaagtcgtaacaaggtagccgtatcggaaggtgcggctggatcacct

SEQ ID NO: 149 - DNA, 1520 bp, artificial sequence; identical to SEQ ID NO: 148
  SPC10358_contig000003_43721_45240

SEQ ID NO: 150 - DNA, 1520 bp, artificial sequence; identical to SEQ ID NO: 148
  SPC10358_contig000003_37474_38993

SEQ ID NO: 151 - DNA, 1515 bp, artificial sequence
  SPC10015_contig000090_331_1845
agagtttgatcctggctcaggatgaacgctagctacaggcttaacacatgcaagtcgaggggcagcatgaacttagcttgctaagtttgatggcgaccggcgcacgggtgagtaacacgtatccaacctgccgatgactcggggatagcctttcgaaagaaagattaatacccgatggcataattcttccgcatggtagaattattaaagaatttcggtcatcgatggggatgcgttccattaggttgttggcggggtaacggcccaccaagccttcgatggataggggttctgagaggaaggtcccccacattggaactgagacacggtccaaactcctacgggaggcagcagtgaggaatattggtcaatggacgagagtctgaaccagccaagtagcgtgaaggatgactgccctatgggttgtaaacttcttttatacgggaataaagtgaggcacgtgtgcctttttgtatgtaccgtatgaataaggatcggctaactccgtgccagcagccgcggtaatacggaggatccgagcgttatccggatttattgggtttaaagggagcgtaggcggacgcttaagtcagttgtgaaagtttgcggctcaaccgtaaaattgcagttgatactgggtgtcttgagtacagtagaggcaggcggaattcgtggtgtagcggtgaaatgcttagatatcacgaagaactccgattgcgaaggcagcctgctggactgtaactgacgctgatgctcgaaagtgtgggtatcaaacaggattagataccctggtagtccacacagtaaacgatgaatactcgctgtttgcgatatacagtaagcggccaagcgaaagcgttaagtattccacctggggagtacgccggcaacggtgaaactcaaaggaattgacgggggcccgcacaagcggaggaacatgtggtttaattcgatgatacgcgaggaaccttacccgggcttgaattgcaactgaatgatgtggagacatgtcagccgcaaggcagttgtgaaggtgctgcatggttgtcgtcagctcgtgccgtgaggtgtcggcttaagtgccataacgagcgcaacccttatcgatagttaccatcaggttatgctggggactctgtcgagactgccgtcgtaagatgtgaggaaggtggggatgacgtcaaatcagcacggcccttacgtccggggctacacacgtgttacaatggggggtacagaaggcagctacacggcgacgtgatgctaatccctaaagcctctctcagttcggattggagtctgcaacccgactccatgaagctggattcgctagtaatcgcgcatcagccacggcgcggtgaatacgttcccgggccttgtacacaccgcccgtcaagccatgaaagccgggggtacctgaagtgcgtaaccgcaaggagcgccctagggtaaaactggtgattggggctaagtcgtaacaaggtagccgtaccggaaggtgcggctggaacacct

SEQ ID NO: 152 - DNA, 1351 bp, artificial sequence
  SPC12350_contig000179_630_1980
aataccgcataagaccgaagcgccgcatggcgcagcggccaaagccccggcggtgcaagatgggcccgcgtctgattaggtggttggcggggtaacggcccaccaagccgacgatcagtagccgacctgagagggtgaccggccacattgggactgagacacggcccagactcctacgggaggcagcagtggggaatattgcacaatgggggaaaccctgatgcagcgacgccgcgtgaaggatgaagtatttcggtatgtaaacttctatcagcagggaagaagatgacggtacctgactaagaagccccggctaactacgtgccagcagccgcggtaatacgtagggggcaagcgttatccggatttactgggtgtaaagggagcgtagacggcgatgcaagccagatgtgaaagcccggggctcaaccccgggactgcatttggaactgcgtggctggagtgtcggagaggcaggcggaattcctagtgtagcggtgaaatgcgtagatattaggaggaacaccagtggcgaaggcggcctgctggacgatgactgacgttgaggctcgaaagcgtggggagcaaacaggattagataccctggtagtccacgccgtaaacgatgactactaggtgtcgggtggcaaggccattcggtgccgcagcaaacgcaataagtagtccacctggggagtacgttcgcaagaatgaaactcaaaggaattgacggggacccgcacaagcggtggagcatgtggtttaattcgaagcaacgcgaagaaccttacctgatcttgacatcccgatgccaaagcgcgtaacgcgctctttcttcggaacatcggtgacaggtggtgcatggttgtcgtcagctcgtgtcgtgagatgttgggttaagtcccgcaacgagcgcaacccctatcttcagtagccagcatttcggatgggcactctggagagactgccagggacaacctggaggaaggtggggatgacgtcaaatcatcatgccccttatgaccagggctacacacgtgctacaatggcgtaaacaaagggaggcgaacccgcgagggtgggcaaatcccaaaaataacgtctcagttcggattgtagtctgcaactcgactacatgaagctggaatcgctagtaatcgcgaatcagaatgtcgcggtgaatacgttcccgggtcttgtacacaccgcccgtcacaccatgggagtcagtaacgcccgaagccggtgacccaacccgcaagggagggagccgtcgaaggtgggaccgataactggggtgaagtcgtaacaaggtagccgtatcggaaggtgcggctggatcacctccttt

SEQ ID NO: 153 - DNA, 1451 bp, artificial sequence
  SPC10632_contig000114_5_1455
acggattggagcttgctccatgaagttagtggcggacgggtgagtaacgcgtgggtaacctgccctatgcagggggataacgtttggaaacgaacgctaataccgcataacctagttggttcgcatgaaccgactagcaaagattttatcggcataggatggacccgcgttggattagctagttggtgagataacagcccaccaaggcaacgatccatagccggcctgagagggtgaacggccacactgggactgagacacggcccagactcctacgggaggcagcagtggggaatattgcacaatgggcgcaagcctgatgcagcgacgccgcgtgaaggatgaaggtcttcggatcgtaaacttctatcagcagggaagaaaccatgacggtacctgactaagaagccccggctaactacgtgccagcagccgcggtaatacgtagggggcaagcgttatccggaattactgggtgtaaagggtgcgtaggcggcgatttaagtcagatgtgaaaactcagggctcaaccttgagactgcatctgaaactgagttgctagagtgcaggagaggaaagcggaattccgagtgtagcggtgaaatgcgtagagattcggaggaacaccagtagcgaaggcggctttctggactgtaactgacgctgaggcacgaaagcgtggggagcgaacaggattagataccctggtagtccacgccgtaaacgatgaatactaggtgtcggggcttacgggtctcggtgccgcagctaacgcattaagtattccacctgggaagtacgaccgcaaggttgaaactcaaaggaattgacggggacccgcacaagcggtggagcatgtggtttaattcgaagcaacgcgaagaaccttacctaaacttgacatccttttgaccggagggtaatgcctccctcactagcttgctagtgcaaaagtgacaggtggtgcatggttgtcgtcagctcgtgtcgtgagatgttgggttaagtcccgcaacgagcgcaacccctatctttagtagccatcattaagttgggcactctagagagactgccagggataacctggaggaaggtggggatgacgtcaaatcatcatgccccttatgtttagggctacacacgtgctacaatgggtgctacaaagggaagcaaatccgcgaggccgagcaaatctcaaaaaagcactcccagttcggattgtagtctgcaactcgactacatgaagttggaatcgctagtaatcgcgaatcagaatgtcgcggtgaatacgttcccgggtcttgtacacaccgcccgtcacaccatgggagttgggggggcccaacgccagtgacctaacccgcaagggaaggagctgtctaaggcaaaaccaatgactggggtgaagtcgtaacaaggtagccgtatcggaaggtgcggctggatcacct

SEQ ID NO: 154 - DNA, 1519 bp, artificial sequence
  SPC10976_contig000001_2695226_2696744
agagtttgatcctggctcaggatgaacgctggcggcgtgcttaacacatgcaagtcgagcggagtatttaaacggaagtcttcggatggaagtttggatacttagcggcggacgggtgagtaacgcgtgggcaacctgccccataccgggggataacagccagaaatggctgctaataccgcataagcgcacagcgcctcatggcgcggtgtgaaaaactccggtggtatgggatgggcccgcgtctgattaggtagttggcggggtaacggcccaccaagccgacgatcagtagccgacctgagagggtgaccggccacattgggactgagacacggcccaaactcctacgggaggcagcagtggggaatattgcacaatgggggaaaccctgatgcagcgacgccgcgtgagcgaagaagtatttcggtatgtaaagctctatcagcagggaagaaaatgacggtacctgactaagaagccccggctaactacgtgccagcagccgcggtaatacgtagggggcaagcgttatccggatttactgggtgtaaagggagcgtagacggccaggcaagtctgatgtgaaaggcaggggctcaacccctggactgcattggaaactgtcaggctggagtgccggagaggtaagcggaattcctagtgtagcggtgaaatgcgtagatattaggaggaacaccagtggcgaaggcggcttactggacggtaactgacgttgatgctcgaaagcgtggggagcaaacaggattagataccctggtagtccacgccgtaaacgatgaatactaggtgtcggggggcaaagcccttcggtgccgccgcaaacgcattaagtattccacctggggagtacgttcgcaagaatgaaactcaaaggaattgacggggacccgcacaagcggtggagcatgtggtttaattcgaagcaacgcgaagaaccttaccaagccttgacatcccattgaagccagagtaacgtctgacggccttcgggacaatggagacaggtggtgcatggttgtcgtcagctcgtgtcgtgagatgttgggttaagtcccgcaacgagcgcaacccttatcttcagtagccagcacgcgatggtgggcactctggagagactgccagggacaacctggaggaaggtggggatgacgtcaaatcatcatgccccttatggcttgggctacacacgtgctacaatggcgtaaacagagggaagcagccctgcgaaggtgagcgaatcccaaaaataacgtctcagttcggattgtagtctgcaactcgactacatgaagctggaatcgctagtaatcgcgaatcagaatgtcgcggtgaatacgttcccgggtcttgtacacaccgcccgtcacaccatgggagtcagtaacgcccgaagtcagtgacctaaccgaaaggaaggagctgccgaaggcgggactggtaactggggtgaagtcgtaacaaggtagccgtatcggaaggtgcggctggatcacct

SEQ ID NO: 155 - DNA, 1519 bp, artificial sequence
  SPC10976_contig000001_1266138_1267656
agagtttgatcctggctcaggatgaacgctggcggcgtgcttaacacatgcaagtcgagcggagtgtttaaccggaagtcttcggatggaaggttagatatttagcggcggacgggtgagtaacgcgtgggcaacctgccccataccgggggataacagccagaaatggctgctaataccgcataagcgcacagcgcctcatggcgcggtgtgaaaaactccggtggtatgggatgggcccgcgtctgattaggtagttggcggggtaacggcccaccaagccgacgatcagtagccgacctgagagggtgaccggccacattgggactgagacacggcccaaactcctacgggaggcagcagtggggaatattgcacaatgggggaaaccctgatgcagcgacgccgcgtgagcgaagaagtatttcggtatgtaaagctctatcagcagggaagaaaatgacggtacctgactaagaagccccggctaactacgtgccagcagccgcggtaatacgtagggggcaagcgttatccggatttactgggtgtaaagggagcgtagacggccaggcaagtctgatgtgaaaggcaggggctcaacccctggactgcattggaaactgtcaggctggagtgccggagaggtaagcggaattcctagtgtagcggtgaaatgcgtagatattaggaggaacaccagtggcgaaggcggcttactggacggtaactgacgttgatgctcgaaagcgtggggagcaaacaggattagataccctggtagtccacgccgtaaacgatgaatactaggtgtcggggggcaaagcccttcggtgccgctgcaaacgcattaagtattccacctggggagtacgttcgcaagaatgaaactcaaaggaattgacggggacccgcacaagcggtggagcatgtggtttaattcgaagcaacgcgaagaaccttaccaagccttgacatcccattgaagccagagtaacgtctgacggccttcgggacaatggagacaggtggtgcatggttgtcgtcagctcgtgtcgtgagatgttgggttaagtcccgcaacgagcgcaacccttatcttcagtagccagcacgcagaggtgggcactctggagagactgccagggacaacctggaggaaggtggggatgacgtcaaatcatcatgccccttatggcttgggctacacacgtgctacaatggcgtaaacagagggaagcagccctgcgaaggtgagcgaatcccaaaaataacgtctcagttcggattgtagtctgcaactcgactacatgaagctggaatcgctagtaatcgcgaatcagaatgtcgcggtgaatacgttcccgggtcttgtacacaccgcccgtcacaccatgggagtcagtaacgcccgaagtcagtgacctaaccgaaaggaaggagctgccgaaggcgggactggtaactggggtgaagtcgtaacaaggtagccgtatcggaaggtgcggctggatcacct

SEQ ID NO: 156 - DNA, 1519 bp, artificial sequence; identical to SEQ ID NO: 154
  SPC10976_contig000001_1728168_1729686

SEQ ID NO: 157 - DNA, 1519 bp, artificial sequence
  SPC10976_contig000001_4132045_4133563
agagtttgatcctggctcaggatgaacgctggcggcgtgcttaacacatgcaagtcgagcggagtatttaaccggaagtcttcggatggaaagttagatacttagcggcggacgggtgagtaacgcgtgggcaacctgccccataccgggggataacagccagaaatggctgctaataccgcataagcgcacagcgccccatggcgcggtgtgaaaaattccggtggtatgggatgggcccgcgtctgattaggtagttggcggggtaacggcccaccaagccgacgatcagtagccgacctgagagggtgaccggccacattgggactgagacacggcccaaactcctacgggaggcagcagtggggaatattgcacaatgggggaaaccctgatgcagcgacgccgcgtgagcgaagaagtatttcggtatgtaaagctctatcagcagggaagaaaatgacggtacctgactaagaagccccggctaactacgtgccagcagccgcggtaatacgtagggggcaagcgttatccggatttactgggtgtaaagggagcgtagacggccaggcaagtctgatgtgaaaggcaggggctcaacccctggactgcattggaaactgtcaggctggagtgccggagaggtaagcggaattcctagtgtagcggtgaaatgcgtagatattaggaggaacaccagtggcgaaggcggcttactggacggtaactgacgttgatgctcgaaagcgtggggagcaaacaggattagataccctggtagtccacgccgtaaacgatgaatactaggtgtcggggggcaaagcccttcggtgccgccgcaaacgcattaagtattccacctggggagtacgttcgcaagaatgaaactcaaaggaattgacggggacccgcacaagcggtggagcatgtggtttaattcgaagcaacgcgaagaaccttaccaagccttgacatcccattgaagccagagtaacgtctgggggccttcgggacaatggagacaggtggtgcatggttgtcgtcagctcgtgtcgtgagatgttgggttaagtcccgcaacgagcgcaacccttatcttcagtagccagcacgcgatggtgggcactctggagagactgccagggacaacctggaggaaggtggggatgacgtcaaatcatcatgccccttatggcttgggctacacacgtgctacaatggcgtaaacagagggaagcagccctgcgaaggtgagcgaatcccaaaaataacgtctcagttcggattgtagtctgcaactcgactacatgaagctggaatcgctagtaatcgcgaatcagaatgtcgcggtgaatacgttcccgggtcttgtacacaccgcccgtcacaccatgggagtcagtaacgcccgaagtcagtgacctaaccgaaaggaaggagctgccgaaggcgggactggtaactggggtgaagtcgtaacaaggtagccgtatcggaaggtgcggctggatcacct

SEQ ID NO: 158 - DNA, 1519 bp, artificial sequence
  SPC10976_contig000001_401628_403146
agagtttgatcctggctcaggatgaacgctggcggcgtgcttaacacatgcaagtcgagcggagtatctaaacggaagtcttcggatggaaggttagatacttagcggcggacgggtgagtaacgcgtgggcaacctgccccataccgggggataacagccagaaatggctgctaataccgcataagcgcacagcgccccatggcgcggtgtgaaaaattccggtggtatgggatgggcccgcgtctgattaggtagttggcggggtaacggcccaccaagccgacgatcagtagccgacctgagagggtgaccggccacattgggactgagacacggcccaaactcctacgggaggcagcagtggggaatattgcacaatgggggaaaccctgatgcagcgacgccgcgtgagcgaagaagtatttcggtatgtaaagctctatcagcagggaagaaaatgacggtacctgactaagaagccccggctaactacgtgccagcagccgcggtaatacgtagggggcaagcgttatccggatttactgggtgtaaagggagcgtagacggccaggcaagtctgatgtgaaaggcaggggctcaacccctggactgcattggaaactgtcaggctggagtgccggagaggtaagcggaattcctagtgtagcggtgaaatgcgtagatattaggaggaacaccagtggcgaaggcggcttactggacggtaactgacgttgatgctcgaaagcgtggggagcaaacaggattagataccctggtagtccacgccgtaaacgatgaatactaggtgtcggggggcaaagcccttcggtgccgccgcaaacgcattaagtattccacctggggagtacgttcgcaagaatgaaactcaaaggaattgacggggacccgcacaagcggtggagcatgtggtttaattcgaagcaacgcgaagaaccttaccaagccttgacatcccattgaagccagagtaacgtctgacggccttcgggacaatggagacaggtggtgcatggttgtcgtcagctcgtgtcgtgagatgttgggttaagtcccgcaacgagcgcaacccttatcttcagtagccagcacgcagaggtgggcactctggagagactgccagggacaacctggaggaaggtggggatgacgtcaaatcatcatgccccttatggcttgggctacacacgtgctacaatggcgtaaacagagggaagcagccctgcgaaggtgagcgaatcccaaaaataacgtctcagttcggattgtagtctgcaactcgactacatgaagctggaatcgctagtaatcgcgaatcagaatgtcgcggtgaatacgttcccgggtcttgtacacaccgcccgtcacaccatgggagtcagtaacgcccgaagtcagtgacctaaccgaaaggaaggagctgccgaaggcgggactggtaactggggtgaagtcgtaacaaggtagccgtatcggaaggtgcggctggatcacct

SEQ ID NO: 159 - DNA, 1444 bp, artificial sequence
  SPC11397_contig000266_5_1448
gaagttttcggatggattctgagatgactgagtggcggacgggtgagtaacacgtggataacctgcctcacactgggggacaacagttagaaatgactgctaataccgcataagcgcacagtaccgcatggtacagtgtgaaaaactccggtggtgtgagatggatccgcgtctgattagccagttggcggggtaacggcccaccaaagcgacgatcagtagccgacctgagagggtgaccggccacattgggactgagacacggcccaaactcctacgggaggcagcagtggggaatattgcacaatgggcgaaagcctgatgcagcgacgccgcgtgagtgaagaagtatttcggtatgtaaagctctatcagcagggaagataatgacggtacctgactaagaagccccggctaactacgtgccagcagccgcggtaatacgtagggggcaagcgttatccggatttactgggtgtaaagggagcgtagacggcatggcaagtctgaagtgaaaacccagggctcaaccctgggactgctttggaaactgtcaagctagagtgcaggagaggtaagtggaattcctagtgtagcggtgaaatgcgtagatattaggaggaacaccagtggcgaaggcggcttactggactgtaactgacgttgaggctcgaaagcgtggggagcaaacaggattagataccctggtagtccacgccgtaaacgatgagtgctaggtgttggggggcaaagcccttcggtgccgtcgcaaacgcaataagcactccacctggggagtacgttcgcaagaatgaaactcaaaggaattgacggggacccgcacaagcggtggagcatgtggtttaattcgaagcaacgcgaagaaccttaccaagtcttgacatccccctgaccggcgtgtaacggcgcctttccttcgggacaggggagacaggtggtgcatggttgtcgtcagctcgtgtcgtgagatgttgggttaagtcccgcaacgagcgcaacccttatccttagtagccagcattaagatgggcactctagggagactgccagggacaacctggaggaaggtggggatgacgtcaaatcatcatgccccttatgatttgggctacacacgtgctacaatggcgtaaacaaagggaagcgaccctgcgaaggtgagcaaatctcaaaaataacgtcccagttcggactgtagtctgcaacccgactacacgaagctggaatcgctagtaatcgcgaatcagaatgtcgcggtgaatacgttcccgggtcttgtacacaccgcccgtcacaccatgggagtcagcaacgcccgaagtcagtgacccaaccgaaaggagggagctgccgaaggcggggcaggtaactggggtgaagtcgtaacaaggtagccgtatcggaaggtgcggctggatcacct

SEQ ID NO: 160 - DNA, 1222 bp, artificial sequence
  SPC10959_contig000059_1_1222
acctgagagggtgaccggccacattgggactgagacacggcccaaactcctacgggaggcagcagtggggaatattgcacaatgggggaaaccctgatgcagcgacgccgcgtgagcgaagaagtatttcggtatgtaaagctctatcagcagggaagaagaaatgacggtacctgactaagaagcaccggctaaatacgtgccagcagccgcggtaatacgtatggtgcaagcgttatccggatttactgggtgtaaagggagcgcaggcggtacggcaagtctgatgtgaaagcccggggctcaaccccggtactgcattggaaactgtcggactagagtgtcggaggggtaagtggaattcctagtgtagcggtgaaatgcgtagatattaggaggaacaccagtggcgaaggcggcttactggacgattactgacgctgaggctcgaaagcgtggggagcaaacaggattagataccctggtagtccacgccgtaaacgatgaatactaggtgtcggggagcattgctcttcggtgccgcagcaaacgcaataagtattccacctggggagtacgttcgcaagaatgaaactcaaaggaattgacggggacccgcacaagcggtggagcatgtggtttaattcgaagcaacgcgaagaaccttaccaagtcttgacatcccgatgacagaacatgtaatgtgttttctcttcggagcatcggtgacaggtggtgcatggttgtcgtcagctcgtgtcgtgagatgttgggttaagtcccgcaacgagcgcaacccctattcttagtagccagcgggtaagccgggcactctagggagactgccagggataacctggaggaaggtggggatgacgtcaaatcatcatgccccttatgacttgggctacacacgtgctacaatggcgtaaacaaagggaagcgagcctgcgagggggagcaaatctcaaaaataacgtctcagttcggactgcagtctgcaactcgactgcacgaagctggaatcgctagtaatcgcgaatcagaatgtcgcggtgaatacgttcccgggtcttgtacacaccgcccgtcacaccatgggagttggtaatgcccgaagtcagtgacccaaccgcaaggagggagctgccgaaggcaggatcgataactggggtgaagtcgtaacaaggtagccgtatcggaaggtgcggctggatcacct

SEQ ID NO: 161 - DNA, 1518 bp, artificial sequence
  SPC10972_contig000006_21109_22626
agagtttgatcctggctcaggatgaacgctggcggcgtgcttaacacatgcaagtcgagcggagtatttaaccggaagtcttcggatggaaagttagatacttagcggcggacgggtgagtaacgcgtgggcaacctgccccataccgggggataacagccagaaatggctgctaataccgcataagcgcacagcgccccatggcgcggtgtgaaaattccggtggtatgggatgggcccgcgtctgattaggtagttggcggggtaacggcccaccaagccgacgatcagtagccgacctgagagggtgaccggccacattgggactgagacacggcccaaactcctacgggaggcagcagtggggaatattgcacaatgggggaaaccctgatgcagcgacgccgcgtgagcgaagaagtatttcggtatgtaaagctctatcagcagggaagaaaatgacggtacctgactaagaagccccggctaactacgtgccagcagccgcggtaatacgtagggggcaagcgttatccggatttactgggtgtaaagggagcgtagacggccaggcaagtctgatgtgaaaggcaggggctcaacccctggactgcattggaaactgtcaggctggagtgccggagaggtaagcggaattcctagtgtagcggtgaaatgcgtagatattaggaggaacaccagtggcgaaggcggcttactggacggtaactgacgttgatgctcgaaagcgtggggagcaaacaggattagataccctggtagtccacgccgtaaacgatgaatactaggtgtcggggggcaaagcccttcggtgccgccgcaaacgcattaagtattccacctggggagtacgttcgcaagaatgaaactcaaaggaattgacggggacccgcacaagcggtggagcatgtggtttaattcgaagcaacgcgaagaaccttaccaagccttgacatcccattgaagccagagtaacgtctgggggccttcgggacaatggagacaggtggtgcatggttgtcgtcagctcgtgtcgtgagatgttgggttaagtcccgcaacgagcgcaacccttatcttcagtagccagcacgcgatggtgggcactctggagagactgccagggacaacctggaggaaggtggggatgacgtcaaatcatcatgccccttatggcttgggctacacacgtgctacaatggcgtaaacagagggaagcagccctgcgaaggtgagcgaatcccaaaaataacgtctcagttcggattgtagtctgcaactcgactacatgaagctggaatcgctagtaatcgcgaatcagaatgtcgcggtgaatacgttcccgggtcttgtacacaccgcccgtcacaccatgggagtcagtaacgcccgaagtcagtgacctaaccgaaaggaaggagctgccgaaggcgggactggtaactggggtgaagtcgtaacaaggtagccgtatcggaaggtgcggctggatcacct

SEQ ID NO: 162 - DNA, 1517 bp, artificial sequence
  SPC10972_contig000001_1615363_1616879
agagtttgatcctggctcaggatgaacgctggcggcgtgcttaacacatgcaagtcgagcggagtgtttaaccggaagtcttcggatggaaggttagatatttagcggcggacgggtgagtaacgcgtgggcaacctgccccataccgggggataacagccagaaatggctgctaataccgcataagcgcacagcgcctcatggcgcggtgtgaaaaactccggtggtatgggatgggcccgcgtctgattaggtagttggcggggtaacggcccaccaagccgacgatcagtagccgacctgagagggtgaccggccacattgggactgagacacggcccaaactcctacgggaggcagcagtggggaatattgcacaatgggggaaaccctgatgcagcgacgccgcgtgagcgaagaagtatttcggtatgtaaagctctatcagcagggaagaaaatgacggtacctgactaagaagccccggctaactacgtgccagcagccgcggtaatacgtagggggcaagcgttatccggatttactgggtgtaaagggagcgtagacggccaggcaagtctgatgtgaaaggcaggggctcaacccctggactgcattggaaactgtcaggctggagtgccggagaggtaagcggaattcctagtgtagcggtgaaatgcgtagatattaggaggaacaccagtggcgaaggcggcttactggacggtaactgacgttgatgctcgaaagcgtggggagcaaacaggattagataccctggtagtccacgccgtaaacgatgaatactaggtgtcgggggcaaagcccttcggtgccgctgcaaacgcattaagtattccacctggggagtacgttcgcaagaatgaaactcaaaggaattgacggggacccgcacaagcggtggagcatgtggtttaattcgaagcaacgcgaagaaccttaccaagccttgacatcccattgaagccagagtaacgtctgacggccttcgggacaatggagacaggtggtgcatggttgtcgtcagctcgtgtcgtgagatgttgggttaagtcccgcaacgagcgcaacccttatcttcagtagccagcacgcagaggtgggcactctggagagactgccagggacaacctggaggaaggtggggatgacgtcaaatcatcatgcccttatggcttgggctacacacgtgctacaatggcgtaaacagagggaagcagccctgcgaaggtgagcgaatcccaaaaataacgtctcagttcggattgtagtctgcaactcgactacatgaagctggaatcgctagtaatcgcgaatcagaatgtcgcggtgaatacgttcccgggtcttgtacacaccgcccgtcacaccatgggagtcagtaacgcccgaagtcagtgacctaaccgaaaggaaggagctgccgaaggcgggactggtaactggggtgaagtcgtaacaaggtagccgtatcggaaggtgcggctggatcacct

SEQ ID NO: 163 - DNA, 1519 bp, artificial sequence; identical to SEQ ID NO: 154
  SPC10972_contig000001_2077101_2078619

SEQ ID NO: 164 - DNA, 1518 bp, artificial sequence
  SPC10972_contig000001_3043729_3045246
agagtttgatcctggctcaggatgaacgctggcggcgtgcttaacacatgcaagtcgagcggagtatttaaacggaagtcttcggatggaagtttggatacttagcggcggacgggtgagtaacgcgtgggcaacctgccccataccgggggataacagccagaaatggctgctaataccgcataagcgcacagcgcctcatggcgcggtgtgaaaaactccggtggtatgggatgggcccgcgtctgattaggtagttggcggggtaacggcccaccaagccgacgatcagtagccgacctgagagggtgaccggccacattgggactgagacacggcccaaactcctacgggaggcagcagtggggaatattgcacaatgggggaaaccctgatgcagcgacgccgcgtgagcgaagaagtatttcggtatgtaaagctctatcagcagggaagaaaatgacggtacctgactaagaagccccggctaactacgtgccagcagccgcggtaatacgtagggggcaagcgttatccggatttactgggtgtaaagggagcgtagacggccaggcaagtctgatgtgaaaggcaggggctcaacccctggactgcattggaaactgtcaggctggagtgccggagaggtaagcggaattcctagtgtagcggtgaaatgcgtagatattaggaggaacaccagtggcgaaggcggcttactggacggtaactgacgttgatgctcgaaagcgtggggagcaaacaggattagataccctggtagtccacgccgtaaacgatgaatactaggtgtcgggggcaaagcccttcggtgccgccgcaaacgcattaagtattccacctggggagtacgttcgcaagaatgaaactcaaaggaattgacggggacccgcacaagcggtggagcatgtggtttaattcgaagcaacgcgaagaaccttaccaagccttgacatcccattgaagccagagtaacgtctgacggccttcgggacaatggagacaggtggtgcatggttgtcgtcagctcgtgtcgtgagatgttgggttaagtcccgcaacgagcgcaacccttatcttcagtagccagcacgcgatggtgggcactctggagagactgccagggacaacctggaggaaggtggggatgacgtcaaatcatcatgccccttatggcttgggctacacacgtgctacaatggcgtaaacagagggaagcagccctgcgaaggtgagcgaatcccaaaaataacgtctcagttcggattgtagtctgcaactcgactacatgaagctggaatcgctagtaatcgcgaatcagaatgtcgcggtgaatacgttcccgggtcttgtacacaccgcccgtcacaccatgggagtcagtaacgcccgaagtcagtgacctaaccgaaaggaaggagctgccgaaggcgggactggtaactggggtgaagtcgtaacaaggtagccgtatcggaaggtgcggctggatcacct

SEQ ID NO: 165 - DNA, 1515 bp, artificial sequence
  SPC10972_contig000002_269204_270718
agagtttgatcctggctcaggatgaacgctggcggcgtgcttaacacatgcaagtcgagcggagtatctaaacggaagtcttcggatggaaggttagatacttagcgcggacgggtgagtaacgcgtgggcaacctgccccataccgggggataacagccagaaatggctgctaataccgcataagcgcacagcgccccatggcgcggtgtgaaaaattccggtggtatgggatgggcccgcgtctgattaggtagttggcggggtaacggcccaccaagccgacgatcagtagccgacctgagagggtgaccggccacattgggactgagacacggcccaaactcctacgggaggcagcagtggggaatattgcacaatgggggaaaccctgatgcagcgacgccgcgtgagcgaagaagtatttcggtatgtaaagctctatcagcagggaagaaaatgacggtacctgactaagaagccccggctaactacgtgccagcagccgcggtaatacgtaggggcaagcgttatccggatttactgggtgtaaagggagcgtagacggccaggcaagtctgatgtgaaaggcaggggctcaacccctggactgcattggaaactgtcaggctggagtgccggagaggtaagcggaattcctagtgtagcggtgaaatgcgtagatattaggaggaacaccagtggcgaaggcggcttactggacggtaactgacgttgatgctcgaaagcgtgggagcaaacaggattagataccctggtagtccacgccgtaaacgatgaatactaggtgtcggggggcaaagcccttcggtgccgccgcaaacgcattaagtattccacctggggagtacgttcgcaagaatgaaactcaaaggaattgacggggacccgcacaagcggtggagcatgtggtttaattcgaagcaacgcgaagaaccttaccaagccttgacatcccattgaagccagagtaacgtctgacggccttcgggacaatggagacaggtggtgcatggttgtcgtcagctcgtgtcgtgagatgttgggttaagtcccgcaacgagcgcaacccttatcttcagtagccagcacgcagaggtgggcactctggagagactgccagggacaacctggaggaaggtggggatgacgtcaaatcatcatgccccttatggcttgggctacacacgtgctacaatggcgtaaacagagggaagcagccctgcgaaggtgagcgaatcccaaaataacgtctcagttcggattgtagtctgcaactcgactacatgaagctggaatcgctagtaatcgcgaatcagaatgtcgcggtgaatacgttcccgggtcttgtacacaccgcccgtcacaccatgggagtcagtaacgcccgaagtcagtgacctaaccgaaaggaaggagctgccgaaggcgggactggtaactggggtgaagtcgtaacaaggtagccgtatcggaaggtgcggctggatcacct

SEQ ID NO: 166 - DNA, 1502 bp, artificial sequence
  SPC10793_contig000001_53305_54806
agagtttgatcctggctcaggacgaacgctggcggcatgcctaacacatgcaagtcgagcgagtggagttcttcggaacaaagctagcggcggacgggtgagtaacacgtgggcaacctgcctcatagaggggaatagcctcccgaaagggagattaataccgcataagattgtagcttcgcatgaagtagcaattaaaggagcaatccgctatgagatgggcccgcggcgcattagctagttggtgaggtaacggctcaccaaggcgacgatgcgtagccgacctgagagggtgatcggccacattgggactgagacacggcccagactcctacgggaggcagcagtggggaatattgcacaatgggggaaaccctgatgcagcaatgccgcgtgagtgatgacggccttcgggttgtaaagctctgtcttcggggacgataatgacggtacccgaggaggaagccacggctaactacgtgccagcagccgcggtaatacgtaggtggcaagcgttgtccggatttactgggcgtaaagggagcgtaggcggatttttaagtgagatgtgaaatacccgggcttaacttgggtgctgcatttcaaactggaagtctagagtgcaggagaggagaagggaattcctagtgtagcggtgaaatgcgtagagattaggaagaacaccagtggcgaaggcgcttctctggactgtaactgacgctgaggctcgaaagcgtggggagcaaacaggattagataccctggtagtccacgccgtaaacgatgaatactaggtgtaggggttgtcatgacctctgtgccgccgctaacgcattaagtattccgcctggggagtacggtcgcaagattaaaactcaaaggaattgacgggggcccgcacaagcagcggagcatgtggtttaattcgaagcaacgcgaagaaccttacctagacttgacatctcctgaattacccgtaactggggaagtcgcttcggcgacaggaagacaggtggtgcatggttgtcgtcagctcgtgtcgtgagatgttgggttaagtcccgcaacgagcgcaacccttattgttagttgctaccatttagttgagcactctagcgagactgcccgggttaaccgggaggaaggtggggatgacgtcaaatcatcatgccccttatgtctagggctacacacgtgctacaatggcaagtacaaagagaagcaagaccgcgaggtggagcaaaactcaaaaacttgtctcagttcggattgtaggctgaaactcgcctacatgaagctggagttgctagtaatcgcgaatcagcatgtcgcggtgaatacgttcccgggccttgtacacaccgcccgtcacaccatgagagttggcaatacccaaagtgcgtgatctaactcgcaagagaggaagcgccctaaggtagggtcagcgattggggtgaagtcgtaacaaggtagccgtaggagaacctgcggctggatcacct

SEQ ID NO: 167 - DNA, 1502 bp, artificial sequence
  SPC10793_contig000001_3886923_3888424
agagtttgatcctggctcaggacgaacgctggcggcatgcctaacacatgcaagtcgagcgagtggagttcttcggagcaaagctagcggcggacgggtgagtaacacgtgggcaacctgcctcatagaggggaatagcctcccgaaagggagattaataccgcataagattgtagcttcgcatgaagtagcaattaaaggagtaatccgctatgagatgggcccgcggcgcattagctagttggtgaggtaacggctcaccaaggcgacgatgcgtagccgacctgagagggtgatcggccacattgggactgagacacggcccagactactacgggaggcagcagtggggaatattgcacaatgggggaaaccctgatgcagcaatgccgcgtgagtgatgacggccttcgggttgtaaagctctgtcttcggggacgataatgacggtacccgaggaggaagccacggctaactacgtgccagcagccgcggtaatacgtaggtggcaagcgttgtccggatttactgggcgtaaagggagcgtaggcggatttttaagtgagatgtgaaatacccgggcttaacttgggtgctgcatttcaaactggaagtctagagtgcaggagaggagaagggaattcctagtgtagcggtgaaatgcgtagagattaggaagaacaccagtggcgaaggcgcttctctggactgtaactgacgctgaggctcgaaagcgtggggagcaaacaggattagataccctggtagtccacgccgtaaacgatgaatactaggtgtaggggttgtcatgacctctgtgccgccgctaacgcattaagtattccgcctggggagtacggtcgcaagattaaaactcaaaggaattgacgggggcccgcacaagcagcggagcatgtggtttaattcgaagcaacgcgaagaaccttacctagacttgacatctcctgaattacccgtaactggggaagtcgcttcggcgacaggaagacaggtggtgcatggttgtcgtcagctcgtgtcgtgagatgttgggttaagtcccgcaacgagcgcaacccttattgttagttgctatcatttagttgagcactctagcgagactgcccgggttaaccgggaggaaggtggggatgacgtcaaatcatcatgccccttatgtctagggctacacacgtgctacaatggcaagtacaaagagaagcaagaccgcgaggtggagcaaaactcaaaaacttgtctcagttcggattgtaggctgaaactcgcctacatgaagctggagttgctagtaatcgcgaatcagcatgtcgcggtgaatacgttcccgggccttgtacacaccgcccgtcacaccatgagagttggcaatacccaaagtgcgtgatctaactcgcaagagaggaagcgccctaaggtagggtcagcgattggggtgaagtcgtaacaaggtagccgtaggagaacctgcggctggatcacct

SEQ ID NO: 168 - DNA, 1502 bp, artificial sequence; identical to SEQ ID NO: 166
  SPC10793_contig000001_19167_20668

SEQ ID NO: 169 - DNA, 1502 bp, artificial sequence; identical to SEQ ID NO: 166
  SPC10793_contig000001_4445065_4446566

SEQ ID NO: 170 - DNA, 1502 bp, artificial sequence
  SPC10793_contig000001_4325802_4327303
agagtttgatcctggctcaggacgaacgctggcggcatgcctaacacatgcaagtcgagcgagttgatctcttcggagtgaagctagcggcggacgggtgagtaacacgtgggcaacctgcctcatagaggggaatagcctcccgaaagggagattaataccgcataagattgtagcttcgcatgaagtagcaattaaaggagcaatccgctatgagatgggcccgcggcgcattagctagttggtgaggtaacggctcaccaaggcgacgatgcgtagccgacctgagagggtgatcggccacattgggactgagacacggcccagactcctacgggaggcagcagtggggaatattgcacaatgggggaaaccctgatgcagcaatgccgcgtgagtgatgacggccttcgggttgtaaagctctgtcttcggggacgataatgacggtacccgaggaggaagccacggctaactacgtgccagcagccgcggtaatacgtaggtggcaagcgttgtccggatttactgggcgtaaagggagcgtaggcggatttttaagtgagatgtgaaatacccgggcttaacttgggtgctgcatttcaaactggaagtctagagtgcaggagaggagaagggaattcctagtgtagcggtgaaatgcgtagagattaggaagaacaccagtggcgaaggcgcttctctggactgtaactgacgctgaggctcgaaagcgtggggagcaaacaggattagataccctggtagtccacgccgtaaacgatgaatactaggtgtaggggttgtcatgacctctgtgccgccgctaacgcattaagtattccgcctggggagtacggtcgcaagattaaaactcaaaggaattgacgggggcccgcacaagcagcggagcatgtggtttaattcgaagcaacgcgaagaaccttacctagacttgacatctcctgaattacccgtaactggggaagtcgcttcggcgacaggaagacaggtggtgcatggttgtcgtcagctcgtgtcgtgagatgttgggttaagtcccgcaacgagcgcaacccttattgttagttgctaccatttagttgagcactctagcgagactgcccgggttaaccgggaggaaggtggggatgacgtcaaatcatcatgccccttatgtctagggctacacacgtgctacaatggcaagtacaaagagaagcaagaccgcgaggtggagcaaaactcaaaaacttgtctcagttcggattgtaggctgaaactcgcctacatgaagctggagttgctagtaatcgcgaatcagcatgtcgcggtgaatacgttcccgggccttgtacacaccgcccgtcacaccatgagagttggcaatacccaaagtgcgtgatctaactcgcaagagaggaagcgccctaaggtagggtcagcgattggggtgaagtcgtaacaaggtagccgtaggagaacctgcggctggatcacct

SEQ ID NO: 171 - DNA, 1502 bp, artificial sequence; identical to SEQ ID NO: 166
  SPC10793_contig000001_11472_12973

SEQ ID NO: 172 - DNA, 1502 bp, artificial sequence
  SPC10793_contig000001_4331616_4333117
agagtttgatcctggctcaggacgaacgctggcggcatgcctaacacatgcaagtcgagcgagttgatctcttcggagtgaagctagcggcggacgggtgagtaacacgtgggcaacctgcctcatagaggggaatagcctcccgaaagggagattaataccgcataagattgtagcttcgcatgaagtagcaattaaaggagcaatccgctatgagatgggcccgcggcgcattagctagttggtgaggtaacggctcaccaaggcgacgatgcgtagccgacctgagagggtgatcggccacattgggactgagacacggcccagactcctacgggaggcagcagtggggaatattgcacaatgggggaaaccctgatgcagcaatgccgcgtgagtgatgacggccttcgggttgtaaagctctgtcttcggggacgataatgacggtatccgaggaggaagccacggctaactacgtgccagcagccgcggtaatacgtaggtggcaagcgttgtccggatttactgggcgtaaagggagcgtaggcggatttttaagtgagatgtgaaatacccgggcttaacttgggtgctgcatttcaaactggaagtctagagtgcaggagaggagaagggaattcctagtgtagcggtgaaatgcgtagagattaggaagaacaccagtggcgaaggcgcttctctggactgtaactgacgctgaggctcgaaagcgtgggaagcaaacaggattagataccctggtagtccacgccgtaaacgatgaatactaggtgtaggggttgtcatgacctctgtgccgccgctaacgcattaagtattccgcctggggagtacggtcgcaagattaaaactcaaaggaattgacgggggcccgcacaagcagcggagcatgtggtttaattcgaagcaacgcgaagaaccttacctagacttgacatctcctgaattacccgtaactggggaagtcgcttcggcgacaggaagacaggtggtgcatggttgtcgtcagctcgtgtcgtgagatgttgggttaagtcccgcaacgagcgcaacccttattgttagttgctaccatttagttgagcactctagcgagactgcccgggttaaccgggaggaaggtggggatgacgtcaaatcatcatgccccttatgtctagggctacacacgtgctacaatggcaagtacaaagagaagcaagaccgcgaggtggagcaaaactcaaaaacttgtctcagttcggattgtaggctgaaactcgcctacatgaagctggagttgctagtaatcgcgaatcagcatgtcgcggtgaatacgttcccgggccttgtacacaccgcccgtcacaccatgagagttggcaatacccaaagtgcgtgatctaactcgcaagagaggaagcgccctaaggtagggtcagcgattggggtgaagtcgtaacaaggtagccgtaggagaacctgcggctggatcacct

SEQ ID NO: 173 - DNA, 1500 bp, artificial sequence
  SPC10793_contig000001_4453833_4455332
agagtttgatcctggctcaggacgaacgctggcggcatgcctaacacatgcaagtcgagcgagtggagttcttcggaacaaagctagcggcggacgggtgagtaacacgtgggcaacctgcctcatagaggggaatagcctcccgaaagggagattaataccgcataagattgtagcttcgcatgaagtagcaattaaaggagcaatccgctatgagatgggcccgcggcgcattagctagttggtgaggtaacggctcaccaaggcgacgatgcgtagccgacctgagagggtgatcggccacattgggactgagacacggcccagactcctacgggaggcagcagtggggaatattgcacaatgggggaaaccctgatgcagcaatgccgcgtgagtgatgacggccttcgggttgtaaagctctgtcttcggggacgataatgacggtacccgaggaggaagccacggctaactacgtgccagcagccgcggtaatacgtaggtggcaagcgttgtccggatttactgggcgtaaagggagcgtaggcggatttttaagtgagatgtgaaatacccgggcttaacttgggtgctgcatttcaaactggaagtctagagtgcaggagaggagaagggaattcctagtgtagcggtgaaatgcgtagagattaggaagaacaccagtggcgaaggcgcttctctggactgtaactgacgctgaggctcgaaagcgtggggagcaaacaggattagataccctggtagtccacgccgtaaacgatgaatactaggtgtaggggttgtcatgacctctgtgccgccgctaacgcattaagtattccgcctggggagtacggtcgcaagattaaaactcaaaggaattgacgggggcccgcacaagcagcggagcatgtggtttaattcgaagcaacgcgaagaaccttacctagacttgacatctcctgaattacccgtaactggggaagtcgcttcggcgacaggaagacaggtggtgcatggttgtcgtcagctcgtgtcgtgagatgttgggttaagtcccgcaacgagcgcaacccttattgttagttgctaccatttagttgagcactctagcgagactgcccgggttaaccgggaggaaggtggggatgacgtcaaatcatcatgccccttatgtctagggctacacacgtgctacaatggcaagtacaaagagaagcaagaccgcgaggtggagcaaaactcaaaaacttgtctcagttcggattgtaggctgaaactcgcctacatgaagctggagttgctagtaatcgcgaatcagcatgtcgcggtgaatacgttcccgggccttgtacacaccgccgtcacaccatgagagttggcaatacccaaagtgcgtgatctaactcgcaagagaggaagcgccctaaggtagggtcagcgattggggtgaagtcgtaacaaggtagccgtaggagaactgcggctggatcacct

SEQ ID NO: 174 - DNA, 1502 bp, artificial sequence
  SPC10793_contig000001_33702_35203
agagtttgatcctggctcaggacgaacgctggcggcatgcctaacacatgcaagtcgagcgagtggagttcttcggaacaaagctagcggcggacgggtgagtaacacgtgggcaacctgcctcatagaggggaatagcctcccgaaagggagattaataccgcataagattgtagcttcgcatgaagtagcaattaaaggagcaatccgctatgagatgggcccgcggcgcattagctagttggtgaggtaacggctcaccaaggcgacgatgcgtagccgacctgagagggtgatcggccacattgggactgagacacggcccagactcctacgggaggcagcagtggggaatattgcacaatgggggaaaccctgatgcagcaatgccgcgtgagtgatgacggccttagggttgtaaagctctgtcttcggggacgataatgacggtacccgaggaggaagccacggctaactacgtgccagcagccgcggtaatacgtaggtggcaagcgttgtccggatttactgggcgtaaagggagcgtaggcggatttttaagtgagatgtgaaatacccgggcttaacttgggtgctgcatttcaaactggaagtctagagtgcaggagaggagaagggaattcctagtgtagcggtgaaatgcgtagagattaggaagaacaccagtggcgaaggcgcttctctggactgtaactgacgctgaggctcgaaagcgtggggagcaaacaggattagataccctggtagtccacgccgtaaacgatgaatactaggtgtaggggttgtcatgacctctgtgccgccgctaacgcattaagtattccgcctggggagtacggtcgcaagattaaaactcaaaggaattgacgggggcccgcacaagcagcggagcatgtggtttaattcgaagcaacgcgaagaaccttacctagacttgacatctcctgaattacccgtaactggggaagtcgcttcggcgacaggaagacaggtggtgcatggttgtcgtcagctcgtgtcgtgagatgttgggttaagtcccgcaacgagcgcaacccttattgttagttgctaccatttagttgagcactctagcgagactgcccgggttaaccgggaggaaggtggggatgacgtcaaatcatcatgccccttatgtctagggctacacacgtgctacaatggcaagtacaaagagaagcaagaccgcgaggtggagcaaaactcaaaaacttgtctcagttcggattgtaggctgaaactcgcctacatgaagctggagttgctagtaatcgcgaatcagcatgtcgcggtgaatacgttcccgggccttgtacacaccgcccgtcacaccatgagagttggcaatacccaaagtgcgtgatctaactcgcaagagaggaagcgccctaaggtagggtcagcgattggggtgaagtcgtaacaaggtagccgtaggagaacctgcggctggatcacct

SEQ ID NO: 175 - DNA, 1502 bp, artificial sequence; identical to SEQ ID NO: 166
  SPC10793_contig000001_5518_7019

SEQ ID NO: 176 - DNA, 1502 bp, artificial sequence
  SPC10793_contig000001_4153338_4154839
agagtttgatcctggctcaggacgaacgctggcggcatgcctaacacatgcaagtcgagcgagttgatctcttcggagtgaagctagcggcggacgggtgagtaacacgtgggcaacctgcctcatagaggggaatagcctcccgaaagggagattaataccgcataagattgtagcttcgcatgaagcagcaattaaaggagcaatccgctatgagatgggcccgcggcgcattagctagttggtgaggtaacggctcaccaaggcgacgatgcgtagccgacctgagagggtgatcggccacattgggactgagacacggcccagactcctacgggaggcagcagtggggaatattgcacaatgggggaaaccctgatgcagcaatgccgcgtgagtgatgacggccttcgggttgtaaagctctgtcttcggggacgataatgacggtacccgaggaggaagccacggctaactacgtgccagcagccgcggtaatacgtaggtggcaagcgttgtccggatttactgggcgtaaagggagcgtaggcggatttttaagtgagatgtgaaatacccgggcttaacttgggtgctgcatttcaaactggaagtctagagtgcaggagaggagaagggaattcctagtgtagcggtgaaatgcgtagagattaggaagaacaccagtggcgaaggcgcttctctggactgtaactgacgctgaggatcgaaagcgtggggagcaaacaggattagataccctggtagtccacgccgtaaacgatgaatactaggtgtaggggttgtcatgacctctgtgccgccgctaacgcattaagtattccgcctggggagtacggtcgcaagattaaaactcaaaggaattgacgggggcccgcacaagcagcggagcatgtggtttaattcgaagcaacgcgaagaaccttacctagacttgacatctcctgaattacccgtaactggggaagtcgcttcggcgacaggaagacaggtggtgcatggttgtcgtcagctcgtgtcgtgagatgttgggttaagtcccgcaacgagcgcaacccttattgttagttgctaccatttagttgagcactctagcgagactacccgggttaaccgggaggaaggtggggatgacgtcaaatcatcatgccccttatgtctagggctacacacgtgctacaatggcaagtacaaagagaagcaagaccgcgaggtggagcaaaactcaaaaacttgtctcagttcggattgtaggctgaaactcgcctacatgaagctggagttgctagtaatcgcgaatcagcatgtcgcggtgaatacgttcccgggccttgtacacaccgcccgtcacaccatgagagttggcaatacccaaagtgcgtgatctaactcgcaagagaggaagcgccctaaggtagggtcagcgattggggtgaagtcgtaacaaggtagccgtaggagaacctgcggctggatcacct

SEQ ID NO: 177 - DNA, 1502 bp, artificial sequence
  SPC10793_contig000001_39710_41211
agagtttgatcctggctcaggacgaacgctggcggcatgcctaacacatgcaagtcgagcgagtggagttcttcggaacaaagctagcggcggacgggtgagtaacacgtgggcaacctgcctcatagaggggaatagcctcccgaaagggagattaataccgcataagattgtagcttcgcatgaagtagcaattaaaggagcaatccgctatgagatgggcccgcggcgcattagctagttggtgaggtaacggctcaccaaggcgacgatgcgtagccgacctgagagggtgatcggccacattgggactgagacacggcccagactcctacgggaggcagcagtggggaatattgcacaatgggggaaaccctgatgcagcaatgccgcgtgagtgatgacggccttcgggttgtaaagctctgtcttcggggacgataatgacggtacccgaggaggaagccacggctaactacgtgccagcagccgcggtaatacgtaggtggcaagcgttgtccggatttactgggcgtaaagggagcgtaggcggatttttaagtgagatgtgaaatacccgggcttaacttgggtgctgcatttcaaactggaagtctagagtgcaggagaggagaagggaattcctagtgtagcggtgaaatgcgtagagattaggaagaacaccagtggcgaaggcgcttctctggattgtaactgacgctgaggctcgaaagcgtggggagcaaacaggattagataccctggtagtccacgccgtaaacgatgaatactaggtgtaggggttgtcatgacctctgtgccgccgctaacgcattaagtattccgcctggggagtacggtcgcaagattaaaactcaaaggaattgacgggggcccgcacaagcagcggagcatgtggtttaattcgaagcaacgcgaagaaccttacctagacttgacatctcctgaattacccgtaactggggaagtcgcttcggcgacaggaagacaggtggtgcatggttgtcgtcagctcgtgtcgtgagatgttgggttaagtcccgcaacgagcgcaacccttattgttagttgctaccatttagttgagcactctagcgagactgcccgggttaaccgggaggaaggtggggatgacgtcaaatcatcatgccccttatgtctagggctacacacgtgctacaatggcaagtacaaagagaagcaagaccgcgaggtggagcaaaactcaaaaacttgtctcagttcggattgtaggctgaaactcgcctacatgaagctggagttgctagtaatcgcgaatcagcatgtcgcggtgaatacgttcccgggccttgtacacaccgcccgtcacaccatgagagttggcaatacccaaagtgcgtgatctaactcgcaagagaggaagcgccctaaggtagggtcagcgattggggtgaagtcgtaacaaggtagccgtaggagaacctgcggctggatcacct

SEQ ID NO: 178 - DNA, 1513 bp, artificial sequence
  SPC10953_contig000133_3754_5266
agagtttgatcctggctcaggacgaacgctggcggcgcgcctaacacatgcaagtcgaacggagcttacgttttgaagttttcggatggatgaatgtaagcttagtggcggacgggtgagtaacacgtgagcaacctgcctttcagagggggataacagccggaaacggctgctaataccgcatgatgttgcgggggcacatgcccctgcaaccaaaggagcaatccgctgaaagatgggctcgcgtccgattagccagttggcggggtaacggcccaccaaagcgacgatcggtagccggactgagaggttgaacggccacattgggactgagacacggcccagactcctacgggaggcagcagtgggggatattgcacaatgggcgaaagcctgatgcagcgacgccgcgtgagggaagacggtcttcggattgtaaacctctgtctttggggaagaaaatgacggtacccaaagaggaagctccggctaactacgtgccagcagccgcggtaatacgtagggagcaagcgttgtccggaattactgggtgtaaagggagcgtaggcgggatggcaagtagaatgttaaatccatcggctcaaccggtggctgcgttctaaactgccgttcttgagtgaagtagaggcaggcggaattcctagtgtagcggtgaaatgcgtagatattaggaggaacaccagtggcgaaggcggcctgctgggctttaactgacgctgaggctcgaaagcgtggggagcaaacaggattagataccctggtagtccacgccgtaaacgatgattactaggtgtggggggactgaccccttccgtgccgcagttaacacaataagtaatccacctggggagtacggccgcaaggttgaaactcaaaggaattgacgggggcccgcacaagcagtggagtatgtggtttaattcgaagcaacgcgaagaaccttaccaggtcttgacatcggatgcatagcctagagataggtgaagcccttcggggcatccagacaggtggtgcatggttgtcgtcagctcgtgtcgtgagatgttgggttaagtcccgcaacgagcgcaacccttattattagttgctacgcaagagcactctaatgagactgccgttgacaaaacggaggaaggtggggatgacgtcaaatcatcatgccccttatgacctgggctacacacgtactacaatggcactaaaacagagggcggcgacaccgcgaggtgaagcgaatcccgaaaaagtgtctcagttcagattgcaggctgcaacccgcctgcatgaagtcggaattgctagtaatcgcggatcagcatgccgcggtgaatacgttcccgggccttgtacacaccgcccgtcacaccatgggagtcggtaacacccgaagccagtagcctaaccgcaaggggggcgctgtcgaaggtgggattgatgactggggtgaagtcgtaacaaggtagccgtatcggaaggtgcggctggatcacct

SEQ ID NO: 179 - DNA, 1519 bp, artificial sequence
  SPC12346_contig000053_23_1541
agagtttgatcctggctcaggatgaacgctggcggcgtgcctaacacatgcaagtcgaacgaagcgatttaacggaagttttcggatggaagttgaattgactgagtggcggacgggtgagtaacgcgtgggtaacctgccttgtactgggggacaacagttagaaatgactgctaataccgcataagcgcacagtatcgcatgatacagtgtgaaaaactccggtggtacaagatggacccgcgtctgattagctagttggtaaggtaacggcttaccaaggcgacgatcagtagccgacctgagagggtgaccggccacattgggactgagacacggcccaaactcctacgggaggcagcagtggggaatattgcacaatgggcgaaagcctgatgcagcgacgccgcgtgagtgaagaagtatttcggtatgtaaagctctatcagcagggaagaaaatgacggtacctgactaagaagccccggctaactacgtgccagcagccgcggtaatacgtagggggcaagcgttatccggatttactgggtgtaaagggagcgtagacggtaaagcaagtctgaagtgaaagcccgcggctcaactgcgggactgctttggaaactgtttaactggagtgtcggagaggtaagtggaattcctagtgtagcggtgaaatgcgtagatattaggaggaacaccagtggcgaaggcgacttactggacgataactgacgttgaggctcgaaagcgtggggagcaaacaggattagataccctggtagtccacgccgtaaacgatgaatactaggtgttggggagcaaagctcttcggtgccgtcgcaaacgcagtaagtattccacctggggagtacgttcgcaagaatgaaactcaaaggaattgacggggacccgcacaagcggtggagcatgtggtttaattcgaagcaacgcgaagaaccttaccaggtcttgacatcgatccgacgggggagtaacgtccccttcccttcggggcggagaagacaggtggtgcatggttgtcgtcagctcgtgtcgtgagatgttgggttaagtcccgcaacgagcgcaacccttattctaagtagccagcggttcggccgggaactcttgggagactgccagggataacctggaggaaggtggggatgacgtcaaatcatcatgccccttatgatctgggctacacacgtgctacaatggcgtaaacaaagagaagcaagaccgcgaggtggagcaaatctcaaaaataacgtctcagttcggactgcaggctgcaactcgcctgcacgaagctggaatcgctagtaatcgcgaatcagaatgtcgcggtgaatacgttcccgggtcttgtacacaccgcccgtcacaccatgggagtcagtaacgcccgaagtcagtgacccaaccgcaaggagggagctgccgaaggcgggaccgataactggggtgaagtcgtaacaaggtagccgtatcggaaggtgcggctggatcacct

SEQ ID NO: 180 - DNA, 1519 bp, artificial sequence; identical to SEQ ID NO: 179
  SPC12346_contig000042_33808_35326

SEQ ID NO: 181 - DNA, 1529 bp, artificial sequence
  SPC12466_contig000035_19449_20977
tattgagagtttgatcctggctcaggatgaacgctggcggcgtgcttaacacatgcaagtcgaacggagtgctcatgacagaggattcgtccaatggagtgagttacttagtggcggacgggtgagtaacgcgtgagtaacctgccttggagtggggaataacaggtggaaacatctgctaataccgcatgatgcagttgagtcgcatggctctgactgccaaagatttatcgctctgagatggactcgcgtctgattagctagttggcggggtaacggcccaccaaggcgacgatcagtagccggactgagaggttggccggccacattgggactgagacacggcccagactcctacgggaggcagcagtggggaatattgggcaatgggcgcaagcctgacccagcaacgccgcgtgaaggaagaaggctttcgggttgtaaacttcttttctcagggacgaagcaagtgacggtacctgaggaataagccacggctaactacgtgccagcagccgcggtaatacgtaggtggcaagcgttatccggatttactgggtgtaaagggcgtgtaggcgggactgcaagtcagatgtgaaaaccacgggctcaacctgtggcctgcatttgaaactgtagttcttgagtactggagaggcagacggaattcctagtgtagcggtgaaatgcgtagatattaggaggaacaccagtggcgaaggcggtctgctggacagcaactgacgctgaggcgcgaaagcgtggggagcaaacaggattagataccctggtagtccacgctgtaaacgatggatactaggtgtggggggtctgaccccctccgtgccgcagttaacacaataagtatcccacctggggagtacgatcgcaaggttgaaactcaaaggaattgacgggggcccgcacaagcggtggagtatgtggtttaattcgaagcaacgcgaagaaccttaccagggcttgacatcccgctgaccggtgtagagatacacctttcccttcggggacagcggtgacaggtggtgcatggttgtcgtcagctcgtgtcgtgagatgttgggttaagtcccgcaacgagcgcaacccctattgttagttgctacgcaagagcactctagcgagactgccgttgacaaaacggaggaaggtggggacgacgtcaaatcatcatgccccttatgtcctgggccacacacgtactacaatggtggtcaacagagggaagcaatcccgcgaggaggagcaaacccctaaaagccatcccagttcggattgcaggctgcaactcgcctgtatgaagttggaatcgctagtaatcgcggatcagcatgccgcggtgaatacgttcccgggccttgtacacaccgcccgtcacaccatgagagtcgggaacacccgaagtccgtagcctaaccgcaaggggggcgcggccgaaggtgggttcgataattggggtgaagtcgtaacaaggtagccgtatcggaaggtgcggctggatcacctccttt

SEQ ID NO: 182 - DNA, 1268 bp, artificial sequence
  SPC10449_contig000131_1_1268
gttggcggggtaacggcccaccaagactacgatggataggggttctgagaggaaggtcccccacattggaactgagacacggtccaaactcctacgggaggcagcagtgaggaatattggtcaatggacgagagtctgaaccagccaagtagcgtgaaggatgactgccctatgggttgtaaacttcttttatatgggaataaagtattccacgtgtgggattttgtatgtaccatatgaataaggatcggctaactccgtgccagcagccgcggtaatacggaggatccgagcgttatccggatttattgggtttaaagggagcgtaggtggattgttaagtcagttgtgaaagtttgcggctcaaccgtaaaattgcagttgaaactggcagtcttgagtacagtagaggtgggcggaattcgtggtgtagcggtgaaatgcttagatatcacgaagaactccgattgcgaaggcagctcactagactgcaactgacactgatgctcgaaagtgtgggtatcaaacaggattagataccctggtagtccacacagtaaacgatgaatactcgctgtttgcgatatacagtaagcggccaagcgaaagcattaagtattccacctggggagtacgccggcaacggtgaaactcaaaggaattgacgggggcccgcacaagcggaggaacatgtggtttaattcgatgatacgcgaggaaccttacccgggcttaaattgcaaatgaataatctggaaacaggttagccgcaaggcatttgtgaaggtgctgcatggttgtcgtcagctcgtgccgtgaggtgtcggcttaagtgccataacgagcgcaacccttatctttagttactaacaggtcatgctgaggactctagagagactgccgtcgtaagatgtgaggaaggtggggatgacgtcaaatcagcacggcccttacgtccggggctacacacgtgttacaatggggggtacagaaggcagctacctggcgacaggatgctaatcccaaaaacctctctcagttcggatcgaagtctgcaacccgacttcgtgaagctggattcgctagtaatcgcgcatcagccatggcgcggtgaatacgttcccgggccttgtacacaccgcccgtcaagccatgaaagccgggggtacctgaagtacgtaaccgcaaggagcgtcctagggtaaaactggtaattggggctaagtcgtaacaaggtagccgtaccggaaggtgcggctggaacacct

SEQ ID NO: 183 - DNA, 1292 bp, artificial sequence
  SPC10448_contig000077_43_1334
agagtttgatcctggctcaggatgaacgctggcggcgtgcctaacacatgcaagtcgaacgaagcaattaaaggaagttttcggatggaatttgattgactgagtggcggacgggtgagtaacgcgtggataacctgcctcacactgggggataacagttagaaatgactgctaataccgcataagcgcacagtaccgcatggtacggtgtgaaaaactccggtggtgtgagatggatccgcgtctgattagccagttggcggggtaacggcccaccaaagcgacgatcagtagccgacctgagagggtgaccggccacattgggactgagacacggcccaaactcctacgggaggcagcagtggggaatattgcacaatgggcgaaagcctgatgcagcgacgccgcgtgagtgaagaagtatttcggtatgtaaagctctatcagcagggaagaaaatgacggtacctgactaagaagccccggctaactacgtgccagcagccgcggtaatacgtagggggcaagcgttatccggatttactgggtgtaaagggagcgtagacggcgaagcaagtctgaagtgaaaacccagggctcaaccctgggactgctttggaaactgttttgctagagtgtcggagaggtaagtggaattcctagtgtagcggtgaaatgcgtagatattaggaggaacaccagtggcgaaggcggcttactggacgataactgacgttgaggctcgaaagcgtggggagcaaacaggattagataccctggtagtccacgccgtaaacgatgaatgctaggtgttggggggcaaagcccttcggtgccgtcgcaaacgcagtaagcattccacctggggagtacgttcgcaagaatgaaactcaaaggaattgacggggacccgcacaagcggtggagcatgtggtttaattcgaagcaacgcgaagaaccttaccaagtcttgacatcctcttgaccggcgtgtaacggcgccttcccttcggggcaagagagacaggtggtgcatggttgtcgtcagctcgtgtcgtgagatgttgggttaagtcccgcaacgagcgcaacccttatccttagtagccagcaggtagagctgggcactctagggagactgccagggataacctggaggaaggtggggatgacgtcaaatcatcatgccccttatgatttgggctacacacgtgctacaatggcgtaaacaaagggaagcaagacagtgatgtggagcaaatcccaaaaataacgtcccagttcggactgta

SEQ ID NO: 184 - DNA, 1622 bp, artificial sequence
  SPC11648_contig000104_2234_3855
tttagagagtttgatcctggctcaggacgaacgctggcggcgtgcctaacacatgcaagtcgaacggagttaagcccgacaccgattggtgaggggaagaacggcgcaaaacaaaacttttaaaaggcagagatgccgggaaaaggattgggaagcaacgaggcgcaggaggacactcaacaatgggtgttggacttaacttagtggcggacgggtgagtaacgcgtgagtaacctgcctttcagagggggataacgtttggaaacgaacgctaataccgcatgacataccggagtcacatggccctggtatcaaaggagcaatccgctgaaagatggactcgcgtccgattagctagttggcggggtaaaggcccaccaaggcgacgatcggtagccggactgagaggttgaacggccacattgggactgagacacggcccagactcctacgggaggcagcagtgggggatattgcacaatgggggaaaccctgatgcagcaacgccgcgtgagggaagaaggttttcggattgtaaacctctgtccttagtgaagataatgacggtagctaaggaggaagctccggctaactacgtgccagcagccgcggtaatacgtagggagcgagcgttgtccggatttactgggtgtaaagggtgcgtaggcggcaaggcaagtcagcagtgaaatccatgggcttaacccatgacgtgctgttgaaactgttttgcttgagtgaagtagaggcaggcggaattcccggtgtagcggtgaaatgcgtagagatcgggaggaacaccagtggcgaaggcggcctgctgggctttaactgacgctgatgcacgaaagtgtgggtagcaaacaggattagataccctggtagtccacaccgtaaacgatgattactaggtgtggggggtctgaccccctccgtgccggagttaacacaataagtaatccacctggggagtacggccgcaaggttgaaactcaaaggaattgacgggggcccgcacaagcagtggagtatgtggtttaattcgaagcaacgcgaagaaccttaccaggtcttgacatccaactaacgaggtagagatacattaggtgcccttcggggaaagttgagacaggtggtgcatggttgtcgtcagctcgtgtcgtgagatgttgggttaagtcccgcaacgagcgcaacccttgtgattagttgctacgcaagagcactctaatcagactgccgttgacaaaacggaggaaggtggggacgacgtcaaatcatcatgccccttatgacctgggctacacacgtactacaatggccgtaaacagagggaagcaaagccgcgaggcggagcaaaaccctaaaagcggtctcagttcggatcgcaggctgcaacccgcctgcgtgaagtcggaattgctagtaatcgcggatcagcatgccgcggtgaatacgttcccgggccttgtacacaccgcccgtcacaccatgggagccggtaatacccgaagtcagtagtctaaccttttaggaggacgctgccgaaggtaggattggcgactggggtgaagtcgtaacaaggtagccgtatcggaaggtgcggctggatcacctccttt

SEQ ID NO: 185 - DNA, 1513 bp, artificial sequence
  SPC12359_contig000126_32_1544
tattgagagtttgatcctggctcaggacgaacgctggcggcgtgcctaacacatgcaagtcgagcgatgaagttccttcgggaacggattagcggcggacgggtgagtaacacgtgggcaacctgccttatagaggggaatagccttccgaaaggaagattaataccgcataagattgtagcttcgcatgaagtagcaattaaaggagcaatccgctataagatgggcccgcggcgcattagctagttggtgaggtaacggctcaccaaggcgacgatgcgtagccgacctgagagggtgatcggccacattgggactgagacacggcccagactcctacgggaggcagcagtggggaatattgcacaatgggggaaaccctgatgcagcaacgccgcgtgagtgatgacggccttcgggttgtaaagctctgtctttggggacgataatgacggtacccaaggaggaagccacggctaactacgtgccagcagccgcggtaatacgtaggtggcaagcgttgtccggatttactgggcgtaaagggagcgtaggcggatttttaagtgggatgtgaaatacccgggctcaacctgggtgctgcattccaaactggaaatctagagtgcaggaggggaaagtggaattcctagtgtagcggtgaaatgcgtagagattaggaagaacaccagtggcgaaggcgactttctggactgtaactgacgctgaggctcgaaagcgtggggagcaaacaggattagataccctggtagtccacgccgtaaacgatgaatactaggtgtaggggttgtcatgacctctgtgccgccgctaacgcattaagtattccgcctggggagtacggtcgcaagattaaaactcaaaggaattgacgggggcccgcacaagtagcggagcatgtggtttaattcgaagcaacgcgaagaaccttacctagacttgacatctcctgaattaccatgtaatgtgggaagtcctttcggggacaggaagacaggtggtgcatggttgtcgtcagctcgtgtcgtgagatgttgggttaagtcccgcaacgagcgcaacccttattgttagttgctaccatttagttgagcactctagcgagactgcccgggttaaccgggaggaaggtggggatgacgtcaaatcatcatgccccttatgtctagggctacacacgtgctacaatggccggtacaacgagatgcaataccgtgaggtggagcaaaactataaaaccggtctcagttcggattgtaggctgaaactcgcctacatgaagctggagttactagtaatcgcgaatcagaatgtcgcggtgaatacgttcccgggccttgtacacaccgcccgtcacaccatgagagttggcaatacccaaagttggtgatctaacccgtaagggaggaagccacctaaggtagggtcagcgattggggtgaagtcgtaacaaggtagccgtaggagaacctgcggctggatcacctccttt

SEQ ID NO: 186 - DNA, 1278 bp, artificial sequence
  SPC12239_contig000069_1_1278
gttggtagggtaacggcctaccaaggcgacgatgcgtagccgacctgagagggtgaccggccacactgggactgagacacggcccagactcctacgggaggcagcagtagggaattttcggcaatgggggaaaccctgaccgagcaacgccgcgtgaaggaagaagtaattcgttatgtaaacttctgtcatagaggaagaacggtggatatagggaatgatatccaagtgacggtactctataagaaagccacggctaactacgtgccagcagccgcggtaatacgtaggtggcgagcgttatccggaattattgggcgtaaagagggagcaggcggcactaagggtctgtggtgaaagatcgaagcttaacttcggtaagccatggaaaccgtagagctagagtgtgtgagaggatcgtggaattccatgtgtagcggtgaaatgcgtagatatatggaggaacaccagtggcgaaggcgacgatctggcgcataactgacgctcagtcccgaaagcgtggggagcaaataggattagataccctagtagtccacgccgtaaacgatgagtactaagtgttgggagtcaaatctcagtgctgcagttaacgcaataagtactccgcctgagtagtacgttcgcaagaatgaaactcaaaggaattgacgggggcccgcacaagcggtggagcatgtggtttaattcgaagcaacgcgaagaaccttaccaggtcttgacatcgatctaaaggctccagagatggagagatagctatagagaagacaggtggtgcatggttgtcgtcagctcgtgtcgtgagatgttgggttaagtcccgcaacgagcgcaacccctgttgccagttgccagcattaagttggggactctggcgagactgccggtgacaagccggaggaaggcggggatgacgtcaaatcatcatgccccttatgacctgggctacacacgtgctacaatggacagagcagagggaagcgaagccgcgaggtggagcgaaacccataaaactgttctcagttcggactgcagtctgcaactcgactgcacgaagatggaatcgctagtaatcgcgaatcagcatgtcgcggtgaatacgttctcgggccttgtacacaccgcccgtcacaccatgagagtcggtaacacccgaagccggtggcctaaccgcaaggaaggagctgtctaaggtgggactgatgattggggtgaagtcgtaacaaggtatccctacgggaacgtggggatggatcacct

SEQ ID NO: 187 - DNA, 1527 bp, artificial sequence
  SPC12585_contig000079_149_1675
tcagagagtttgatcctggctcaggatgaacgctggcggcgtgcttaacacatgcaagtcgaacgggaaaccttttattgaagcttcggcagatttagctggtttctagtggcggacgggtgagtaacgcgtgggtaacctgccttatacagggggataacaaccagaaatggttgctaataccgcataagcgcacaggaccgcatggtccggtgtgaaaaactccggtggtataagatggacccgcgttggattagctagttggcagggtaacggcctaccaaggcgacgatccatagccggcctgagagggtgaacggccacattgggactgagacacggcccagactcctacgggaggcagcagtggggaatattgcacaatgggggaaaccctgatgcagcgacgccgcgtgaaggaagaagtatctcggtatgtaaacttctatcagcagggaagatagtgacggtacctgactaagaagccccggctaactacgtgccagcagccgcggtaatacgtagggggcaagcgttatccggatttactgggtgtaaagggagcgtagacggactggcaagtctgatgtgaaaggcgggggctcaacccctggactgcattggaaactgttagtcttgagtgccggagaggtaagcggaattcctagtgtagcggtgaaatgcgtagatattaggaggaacaccagtggcgaaggcggcttactggacggtaactgacgttgaggctcgaaagcgtggggagcaaacaggattagataccctggtagtccacgccgtaaacgatgaatactaggtgttggggagcaaagctcttcggtgccgccgcaaacgcattaagtattccacctggggagtacgttcgcaagaatgaaactcaaaggaattgacggggacccgcacaagcggtggagcatgtggtttaattcgaagcaacgcgaagaaccttaccaagtcttgacatccctctgaccgactcttaaccgagtctttccttcgggacaggggagacaggtggtgcatggttgtcgtcagctcgtgtcgtgagatgttgggttaagtcccgcaacgagcgcaacccctatccccagtagccagcggttcggccgggcactctgaggagactgccagggataacctggaggaaggcggggatgacgtcaaatcatcatgccccttatgatttgggctacacacgtgctacaatggcgtaaacaaagggaagcaagcctgcgaaggtaagcaaatcccaaaaataacgtcccagttcggactgcagtctgcaactcgactgcacgaagctggaatcgctagtaatcgcggatcagaatgccgcggtgaatacgttcccgggtcttgtacacaccgcccgtcacaccatgggagtcagtaacgcccgaagtcagtgacctaactgcaaagaaggagctgccgaaggcgggaccgatgactggggtgaagtcgtaacaaggtagccgtatcggaaggtgcggctggatcacctccttt

SEQ ID NO: 188 - DNA, 1530 bp, artificial sequence
  PPC00224_contig000169_16_1545
agagtttgatcatggctcagattgaacgctggcggcaggcctaacacatgcaagtcgaacggtaacaggaagcagcttgcttctttgctgacgagtggcggacgggtgagtaatgtctgggaaactgcctgatggagggggataactactggaaacggtagctaataccgcataacgtcgcaagaccaaagagggggaccttcgggcctcttgccatcggatgtgcccagatgggattagctagtaggtggggtaacggctcacctaggcgacgatccctagctggtctgagaggatgaccagccacactggaactgagacacggtccagactcctacgggaggcagcagtggggaatattgcacaatgggcgcaagcctgatgcagccatgccgcgtgtatgaagaaggccttcgggttgtaaagtactttcagcggggaggaagggagtaaagttaatacctttgctcattgacgttacccgcagaagaagcaccggctaactccgtgccagcagccgcggtaatacggagggtgcaagcgttaatcggaattactgggcgtaaagcgcacgcaggcggtttgttaagtcagatgtgaaatccccgggctcaacctgggaactgcatctgatactggcaagcttgagtctcgtagaggggggtagaattccaggtgtagcggtgaaatgcgtagagatctggaggaataccggtggcgaaggcggccccctggacgaagactgacgctcaggtgcgaaagcgtggggagcaaacaggattagataccctggtagtccacgccgtaaacgatgtcgacttggaggttgtgcccttgaggcgtggcttccggagctaacgcgttaagtcgaccgcctggggagtacggccgcaaggttaaaactcaaatgaattgacgggggcccgcacaagcggtggagcatgtggtttaattcgatgcaacgcgaagaaccttacctggtcttgacatccacggaagttttcagagatgggtttgtgccttcgggaactgtgagacaggtgctgcatggctgtcgtcagctcgtgttgtgaaatgttgggttaagtcccgcaacgagcgcaacccttatcctttgttgccagcggtccggccgggaactcaaaggagactgccagtgataaactggaggaaggtggggatgacgtcaagtcatcatggcccttacgaccagggctacacacgtgctacaatggcgcatacaaagagaagcgacctcgcgagagcaagcggacctcataaagtgcgtcgtagtccggattggagtctgcaactcgactccatgaagtcggaatcgctagtaatcgtggatcagaatgccacggtgaatacgttcccgggccttgtacacaccgcccgtcacaccatgggagtgggttgcaaaagaagtaggtagcttaaccttcgggagggcgcttaccactttgtgattcatgactggggtgaagtcgtaacaaggtaaccgtaggggaacctgcggttggatcacct

SEQ ID NO: 189 - DNA, 1540 bp, artificial sequence
  SPC12130_contig000074_41_1580
tatgagagtttgatcctggctcaggatgaacgctggcggcgtgcctaacacatgcaagtcgagcgagggtttgctcagtattgagtattctaagactagaatgttcaattctgagcaaaaccaagcggcggacgggtgagtaacgcgtgggtaacctgccctatacacatggataacatactgaaaagtttactaatacatgataatatatatttgcggcatcgcagatatatcaaagtgttagcggtataggatggacccgcgtctgattagctagttggtgagataactgcccaccaaggcgacgatcagtagccgacctgagagggtgatcggccacattggaactgagacacggtccaaactcctacgggaggcagcagtggggaatattgcacaatgggcgaaagcctgatgcagcaacgccgcgtgaacgatgaaggtcttcggatcgtaaagttctgttgcaggggaagataatgacggtaccctgtgaggaagccccggctaactacgtgccagcagccgcggtaatacgtagggggctagcgttatccggatttactgggcgtaaagggtgcgtaggtggtccttcaagtcggtggttaaaggctacggctcaaccgtagtaagccgccgaaactggaggacttgagtgcaggagaggaaagtggaattcccagtgtagcggtgaaatgcgtagatattgggaggaacaccagtagcgaaggcggctttctggactgcaactgacactgaggcacgaaagcgtgggtagcaaacaggattagataccctggtagtccacgctgtaaacgatgagtactaggtgtcgggggttacccccctcggtgccgcagctaacgcattaagtactccgcctggggagtacgcacgcaagtgtgaaactcaaaggaattgacggggacccgcacaagtagcggagcatgtggtttaattcgaagcaacgcgaagaaccttacctaagcttgacatccctcggacaggtgtttaatcacacccttccttcgggactgaggtgacaggtggtgcatggttgtcgtcagctcgtgtcgtgagatgttgggttaagtcccgcaacgagcgcaacccttgtctttagttgccagcattcagttgggcactctagagagactgccagggataacctggaggaaggtggggatgacgtcaaatcatcatgccccttatgcttagggctacacacgtgctacaatgggtggtacagagggttgccaaaccgtgaggtggagccaatcccttaaagccattctcagttcggattgtaggctgaaactcgcctacatgaagctggagttactagtaatcgcagatcagaatgctgcggtgaatgcgttcccgggtcttgtacacaccgcccgtcacaccacgggagtcggaaacacccgaagccgattatccaaccgcaaggaggaagtcgtcgaaggtggcgtcgataactggggtgaagtcgtaacaaggtagccgtatcggaaggtgcggctggatcacctccttt

SEQ ID NO: 190 - DNA, 1528 bp, artificial sequence
  SPC10202_contig000001_85910_87437
agagtttgatcctggctcaggatgaacgctggcggcatgcctaatacatgcaagtcgaacgaagtttcgaggaagcttgcttccaaagagacttagtggcgaacgggtgagtaacacgtaggtaacctgcccatgtgtccgggataactgctggaaacggtagctaaaaccggataggtatacagagcgcatgctcagtatattaaagcgcccttcaaggcgtgaacatggatggacctgcggcgcattagctagttggtgaggtaacggcccaccaaggcaatgatgcgtagccggcctgagagggtaaacggccacattgggactgagacacggcccaaactcctacgggaggcagcagtagggaattttcgtcaatgggggaaaccctgaacgagcaatgccgcgtgagtgaagaaggtcttcggatcgtaaagctctgttgtaagtgaagaacggctcatagaggaaatgctatgggagtgacggtagcttaccagaaagccacggctaactacgtgccagcagccgcggtaatacgtaggtggcaagcgttatccggaatcattgggcgtaaagggtgcgtaggtggcgtactaagtctgtagtaaaaggcaatggctcaaccattgtaagctatggaaactggtatgctggagtgcagaagagggcgatggaattccatgtgtagcggtaaaatgcgtagatatatggaggaacaccagtggcgaaggcggtcgcctggtctgtaactgacactgaggcacgaaagcgtggggagcaaataggattagataccctagtagtccacgccgtaaacgatgagaactaagtgttggaggaattcagtgctgcagttaacgcaataagttctccgcctggggagtatgcacgcaagtgtgaaactcaaaggaattgacgggggcccgcacaagcggtggagtatgtggtttaattcgaagcaacgcgaagaaccttaccaggccttgacatggaaacaaataccctagagatagggggataattatggatcacacaggtggtgcatggttgtcgtcagctcgtgtcgtgagatgttgggttaagtcccgcaacgagcgcaacccttgtcgcatgttaccagcatcaagttggggactcatgcgagactgccggtgacaaaccggaggaaggtggggatgacgtcaaatcatcatgccccttatggcctgggctacacacgtactacaatggcgaccacaaagagcagcgacacagtgatgtgaagcgaatctcataaaggtcgtctcagttcggattgaagtctgcaactcgacttcatgaagtcggaatcgctagtaatcgcagatcagcatgctgcggtgaatacgttctcgggccttgtacacaccgcccgtcaaaccatgggagtcagtaatacccgaagccggtggcataaccgtaaggagtgagccgtcgaaggtaggaccgatgactggggttaagtcgtaacaaggtatccctacgggaacgtggggatggatcacct

SEQ ID NO: 191 - DNA, 1528 bp, artificial sequence
  SPC10202_contig000001_2111098_2112625
agagtttgatcctggctcaggatgaacgctggcggcatgcctaatacatgcaagtcgaacgaagtttcgaggaagcttgcttccaaagagacttagtggcgaacgggtgagtaacacgtaggtaacctgcccatgtgtccgggataactgctggaaacggtagctaaaaccggataggtatacagagcgcatgctcagtatattaaagcgcccttcaaggcgtgaacatggatggacctgcggcgcattagctagttggtgaggtaacggcccaccaaggcaatgatgcgtagccggcctgagagggtaaacggccacattgggactgagacacggcccaaactcctacgggaggcagcagtagggaattttcgtcaatgggggaaaccctgaacgagcaatgccgcgtgagtgaagaaggtcttcggatcgtaaagctctgttgtaagtgaagaacggctcatagaggaaatgctatgggagtgacggtagcttaccagaaagccacggctaactacgtgccagcagccgcggtaatacgtaggtggcaagcgttatccggaatcattgggcgtaaagggtgcgtaggtggcgtactaagtctgtagtaaaaggcaatggctcaaccattgtaagctatggaaactggtatgctggagtgcagaagagggcgatggaattccatgtgtagcggtaaaatgcgtagatatatggaggaacaccagtggcgaaggcggtcgcctggtctgtaactgacactgaggcacgaaagcgtggggagcaaataggattagataccctagtagtccacgccgtaaacgatgagaactaagtgttggagaaattcagtgctgcagttaacgcaataagttctccgcctggggagtatgcacgcaagtgtgaaactcaaaggaattgacgggggcccgcacaagcggtggagtatgtggtttaattcgaagcaacgcgaagaaccttaccaggccttgacatggaaacaaataccctagagatagggggataattatggatcacacaggtggtgcatggttgtcgtcagctcgtgtcgtgagatgttgggttaagtcccgcaacgagcgcaacccttgtcgcatgttaccagcatcaagttggggactcatgcgagactgccggtgacaaaccggaggaaggtggggatgacgtcaaatcatcatgccccttatggcctgggctacacacgtactacaatggcgaccacaaagagcagcgacacagtgatgtgaagcgaatctcataaaggccgtctcagttcggattgaagtctgcaactcgacttcatgaagtcggaatcgctagtaatcgcagatcagcatgctgcggtgaatacgttctcgggccttgtacacaccgcccgtcaaaccatgggagtcagtaatacccgaagccggtggcataaccgtaaggagtgagccgtcgaaggtaggaccgatgactggggttaagtcgtaacaaggtatccctacgggaacgtggggatggatcacct

SEQ ID NO: 192 - DNA, 1528 bp, artificial sequence; identical to SEQ ID NO: 190
  SPC10202_contig000001_2696331_2697858

SEQ ID NO: 193 - DNA, 1528 bp, artificial sequence
  SPC10202_contig000001_4180544_4182071
agagtttgatcctggctcaggatgaacgctggcggcatgcctaatacatgcaagtcgaacgaagtttcgaggaagcttgcttccaaagagacttagtggcgaacgggtgagtaacacgtaggtaacctgcccatgtgtccgggataactgctggaaacggtagctaaaaccggataggtatacagagcgcatgctcagtatattaaagcgcccatcaaggcgtgaacatggatggacctgcggcgcattagctagttggtgaggtaacggcccaccaaggcgatgatgcgtagccggcctgagagggtaaacggccacattgggactgagacacggcccaaactcctacgggaggcagcagtagggaattttcgtcaatgggggaaaccctgaacgagcaatgccgcgtgagtgaagaaggtcttcggatcgtaaagctctgttgtaagtgaagaacggctcatagaggaaatgctatgggagtgacggtagcttaccagaaagccacggctaactacgtgccagcagccgcggtaatacgtaggtggcaagcgttatccggaatcattgggcgtaaagggtgcgtaggtggcgtactaagtctgtagtaaaaggcaatggctcaaccattgtaagctatggaaactggtatgctggagtgcagaagagggcgatggaattccatgtgtagcggtaaaatgcgtagatatatggaggaacaccagtggcgaaggcggtcgcctggtctgtaactgacactgaggcacgaaagcgtggggagcaaataggattagataccctagtagtccacgccgtaaacgatgagaactaagtgttggaggaattcagtgctgcagttaacgcaataagttctccgcctggggagtatgcacgcaagtgtgaaactcaaaggaattgacgggggcccgcacaagcggtggagtatgtggtttaattcgaagcaacgcgaagaaccttaccaggccttgacatggaaacaaataccctagagatagggggataattatggatcacacaggtggtgcatggttgtcgtcagctcgtgtcgtgagatgttgggttaagtcccgcaacgagcgcaacccttgtcgcatgttaccagcatcaagttggggactcatgcgagactgccggtgacaaaccggaggaaggtggggatgacgtcaaatcatcatgccccttatggcctgggctacacacgtactacaatggcgaccacaaagagcagcgacacagtgatgtgaagcgaatctcataaaggtcgtctcagttcggattgaagtctgcaactcgacttcatgaagtcggaatcgctagtaatcgcagatcagcatgctgcggtgaatacgttctcgggccttgtacacaccgcccgtcaaaccatgggagtcagtaatacccgaagccggtggcataaccgcaaggagtgagccgtcgaaggtaggaccgatgactggggttaagtcgtaacaaggtatccctacgggaacgtggggatggatcacct

SEQ ID NO: 194 - DNA, 1528 bp, artificial sequence
  SPC10202_contig000001_1756783_1758310
agagtttgatcctggctcaggatgaacgctggcggcatgcctaatacatgcaagtcgaacgaagactctaggaagcttgcttccaaagagacttagtggcgaacgggtgagtaacacgtaggtaacctgcccatgtgtccgggataactgctggaaacggtagctaaaaccggataggtatacagagcgcatgctcagtatattaaagcgcccttcaaggcgtgaacatggatggacctgcggcgcattagctagttggtgaggtaacggcccaccaaggcaatgatgcgtagccggcctgagagggtaaacggccacattgggactgagacacggcccaaactcctacgggaggcagcagtagggaattttcgtcaatgggggaaaccctgaacgagcaatgccgcgtgagtgaagaaggtcttcggatcgtaaagctctgttgtaagtgaagaacggctcatagaggaaatgctatgggagtgacggtagcttaccagaaagccacggctaactacgtgccagcagccgcggtaatacgtaggtggcaagcgttatccggaatcattgggcgtaaagggtgcgtaggtggcgtactaagtctgtagtaaaaggcaatggctcaaccattgtaagctatggaaactggtatgctggagtgcagaagagggcgatggaattccatgtgtagcggtaaaatgcgtagatatatggaggaacaccagtggcgaaggcggtcgcctggtctgtaactgacactgaggcacgaaagcgtggggagcaaataggattagataccctagtagtccacgccgtaaacgatgagaactaagtgttggaggaattcagtgctgcagttaacgcaataagttctccgcctggggagtatgcacgcaagtgtgaaactcaaaggaattgacgggggcccgcacaagcggtggagtatgtggtttaattcgaagcaacgcgaagaaccttaccaggccttgacatggaaacaaataccctagagatagggggataattatggatcacacaggtggtgcatggttgtcgtcagctcgtgtcgtgagatgttgggttaagtcccgcaacgagcgcaacccttgtcgcatgttaccagcatcaagttggggactcatgcgagactgccggtgacaaaccggaggaaggtggggatgacgtcaaatcatcatgccccttatggcctgggctacacacgtactacaatggcgaccacaaagagcagcgacacagtgatgtgaagcgaatctcataaaggtcgtctcagttcggattgaagtctgcaactcgacttcatgaagtcggaatcgctagtaatcgcagatcagcatgctgcggtgaatacgttctcgggccttgtacacaccgcccgtcaaaccatgggagtcagtaatacccgaagccggtggcataaccgtaaggagtgagccgtcgaaggtaggaccgatgactggggttaagtcgtaacaaggtatccctacgggaacgtggggatggatcacct

SEQ ID NO: 195 - DNA, 1528 bp, artificial sequence
  SPC12358_contig000113_48_1575
agagtttgatcctggctcaggatgaacgctggcggcatgcctaatacatgcaagtcgaacgaagtttcgaggaagcttgcttccaaagagacttagtggcgaacgggtgagtaacacgtaggtaacctgcccatgtgtccgggataactgctggaaacggtagctaaaaccggataggtatacagagcgcatgctcagtatattaaagcgcccatcaaggcgtgaacatggatggacctgcggcgcattagctagttggtgaggtaacggcccaccaaggcgatgatgcgtagccggcctgagagggtaaacggccacattgggactgagacacggcccaaactcctacgggaggcagcagtagggaattttcgtcaatgggggaaaccctgaacgagcaatgccgcgtgagtgaagaaggtcttcggatcgtaaagctctgttgtaagtgaagaacggctcatagaggaaatgctatgggagtgacggtagcttaccagaaagccacggctaactacgtgccagcagccgcggtaatacgtaggtggcaagcgttatccggaatcattgggcgtaaagggtgcgtaggtggcgtactaagtctgtagtaaaaggcaatggctcaaccattgtaagctatggaaactggtatgctggagtgcagaagagggcgatggaattccatgtgtagcggtaaaatgcgtagatatatggaggaacaccagtggcgaaggcggtcgcctggtctgtaactgacactgaggcacgaaagcgtggggagcaaataggattagataccctagtagtccacgccgtaaacgatgagaactaagtgttggaggaattcagtgctgcagttaacgcaataagttctccgcctggggagtatgcacgcaagtgtgaaactcaaaggaattgacgggggcccgcacaagcggtggagtatgtggtttaattcgaagcaacgcgaagaaccttaccaggccttgacatggatgcaaaggctctagagatagagagataattatggatcacacaggtggtgcatggttgtcgtcagctcgtgtcgtgagatgttgggttaagtcccgcaacgagcgcaacccttgtcgcatgttaccagcatcaagttggggactcatgcgagactgccggtgacaaaccggaggaaggtggggatgacgtcaaatcatcatgccccttatggcctgggctacacacgtactacaatggcgaccacaaagagcagcgacacagtgatgtgaagcgaatctcataaaggtcgtctcagttcggattgaagtctgcaactcgacttcatgaagtcggaatcgctagtaatcgcagatcagcatgctgcggtgaatacgttctcgggccttgtacacaccgcccgtcaaaccatgggagtcagtaatacccgaagccggtggcataaccgcaaggagtgagccgtcgaaggtaggaccgatgactggggttaagtcgtaacaaggtatccctacgggaacgtggggatggatcacct

SEQ ID NO: 196 - DNA, 1368 bp, artificial sequence
  SPC10184_contig000160_13_1380
agagtttgatcctggctcaggatgaacgctggcggcgtgcttaacacatgcaagtcgaacgggaaatatttcattgagacttcggtggatttgatctatttctagtggcggacgggtgagtaacgcgtgggtaacctgccttatacagggggataacagtcagaaatggctgctaataccgcataagcgcacagagctgcatggctcagtgtgaaaaactccggtggtataagatggacccgcgttggattagctagttggtggggtaacggcccaccaaggcgacgatccatagccggcctgagagggtgaacggccacattgggactgagacacggcccagactcctacgggaggcagcagtggggaatattgcacaatgggggaaaccctgatgcagcgacgccgcgtgaaggaagaagtatctcggtatgtaaacttctatcagcagggaagatagtgacggtacctgactaagaagccccggctaactacgtgccagcagccgcggtaatacgtagggggcaagcgttatccggatttactgggtgtaaagggagcgtagacggtgtggcaagtctgatgtgaaaggcatgggctcaacctgtggactgcattggaaactgtcatacttgagtgccggaggggtaagcggaattcctagtgtagcggtgaaatgcgtagatattaggaggaacaccagtggcgaaggcggcttactggacggtaactgacgttgaggctcgaaagcgtggggagcaaacaggattagataccctggtagtccacgccgtaaacgatgaatactaggtgtcgggtggcagagccattcggtgccgtcgcaaacgcagtaagtattccacctggggagtacgttcgcaagaatgaaactcaaaggaattgacggggacccgcacaagcggtggagcatgtggtttaattcgaagcaacgcgaagaaccttaccaagtcttgacatccgcctgaccgatccttaaccggatctttccttcgggacaggcgagacaggtggtgcatggttgtcgtcagctcgtgtcgtgagatgttgggttaagtcccgcaacgagcgcaacccctatcctcagtagccagcatttaaggtgggcactctggggagactgccagggataacctggaggaaggcggggatgacgtcaaatcatcatgccccttatgatttgggctacacacgtgctacaatggcgtaaacaaagggaagcgagattgtgagatggagcaaatcccaaaaataacgtcccagttcggactgtagtctgcaacccgactacacgaagctggaatcgctagtaatcgcggatcagaatgccgcggtgaatacgttcccggg

SEQ ID NO: 197 - DNA, 1522 bp, artificial sequence
  SPC11276_contig000182_58_1579
agagtttgatcctggctcaggatgaacgctggcggcgtgcctaacacatgcaagtcgaacgaagcgattaggatgaagttttcggatggattcctggttgactgagtggcggacgggtgagtaacgcgtggataacctgcctcacactgggggataacagttagaaatggctgctaataccgcataagcgcacagtaccgcatggtacggtgtgaaaaacccaggtggtgtgagatggatccgcgtctgattagccagttggcggggtaacggcccaccaaagcgacgatcagtagccgacctgagagggtgaccggccacattgggactgagacacggcccaaactcctacgggaggcagcagtggggaatattgcacaatgggcggaagcctgatgcagcgacgccgcgtgagtgaagaagtatctcggtatgtaaagctctatcagcagggaagaaaatgacggtacctgactaagaagccccggctaactacgtgccagcagccgcggtaatacgtagggggcaagcgttatccggatttactgggtgtaaagggagcgtagacggcgacgcaagtctggagtgaaagcccggggcccaaccccgggactgctttggaaactgtgctgctggagtgcaggagaggtaagtggaattcctagtgtagcggtgaaatgcgtagatattaggaggaacaccagtggcgaaggcggcttactggactgtaactgacgttgaggctcgaaagcgtggggagcaaacaggattagataccctggtagtccacgccgtaaacgatgaatgctaggtgtcggggggcaaagcccttcggtgccgccgctaacgcaataagcattccacctggggagtacgttcgcaagaatgaaactcaaaggaattgacggggacccgcacaagcggtggagcatgtggtttaattcgaagcaacgcgaagaaccttaccaagtcttgacatccccctgaccggcgcgtaacggtgcccttccttcgggacaggggagacaggtggtgcatggttgtcgtcagctcgtgtcgtgagatgttgggttaagtcccgcaacgagcgcaacccttatccttagtagccagcacgtcgtggtgggcactctagggagactgccagggataacctggaggaaggtggggatgacgtcaaatcatcatgccccttatgatttgggctacacacgtgctacaatggcgtaaacaaagggaggcgaccctgcgaaggtaagcaaatcccaaaaataacgtcccagttcggactgtagtctgcaacccgactacacgaagctggaatcgctagtaatcgcggatcagaatgccgcggtgaatacgttcccgggtcttgtacacaccgcccgtcacaccatgggagtcagcaacgcccgaagtcagtgacccaaccttaacaggagggagctgccgaaggcggggcaggtaactggggtgaagtcgtaacaaggtagccgtatcggaaggtgcggctggatcacct

SEQ ID NO: 198 - DNA, 1519 bp, artificial sequence
  SPC11483_contig000110_42_1560
atgaagagtttgatcctggctcaggatgaacgctagctacaggcttaacacatgcaagtcgaggggcatcagggtgtagcaatacaccgctggcgaccggcgcacgggtgagtaacacgtatccaacctgccctttactcggggatagcctttcgaaagaaagattaatacccgatggtataacatgacctcctggttttgttattaaagaatttcggtagaggatggggatgcgttccattaggcagttggcggggtaacggcccaccaaaccttcgatggataggggttctgagaggaaggtcccccacattggaactgagacacggtccaaactcctacgggaggcagcagtgaggaatattggtcaatgggcgagagcctgaaccagccaagtagcgtgaaggatgaccgccctatgggttgtaaacttcttttatatgggaataaagtttgccacgtgtggcattttgtatgtaccatatgaataaggatcggctaactccgtgccagcagccgcggtaatacggaggatccgagcgttatccggatttattgggtttaaagggagcgtaggtggacatgtaagtcagttgtgaaagtttgcggctcaaccgtaaaattgcagttgatactgcgtgtcttgagtacagtagaggtgggcggaattcgtggtgtagcggtgaaatgcttagatatcacgaagaactccgattgcgaaggcagctcactggactgcaactgacactgatgctcgaaagtgtgggtatcaaacaggattagataccctggtagtccacacagtaaacgatgaatactcgctgtttgcgatatacagtaagcggccaagcgaaagcattaagtattccacctggggagtacgccggcaacggtgaaactcaaaggaattgacgggggcccgcacaagcggaggaacatgtggtttaattcgatgatacgcgaggaaccttacccgggcttaaattgcaaatgaatatgccggaaacggcatagccgcaaggcatttgtgaaggtgctgcatggttgtcgtcagctcgtgccgtgaggtgtcggcttaagtgccataacgagcgcaacccttatcttcagttactaacaggttatgctgaggactctggagagactgccgtcgtaagatgtgaggaaggtggggatgacgtcaaatcagcacggcccttacgtccggggctacacacgtgttacaatggggggtacagaaggccgctacacagcgatgtgatgccaatccctaaagcccctctcagttcggatcgaagtctgcaacccgacttcgtgaagctggattcgctagtaatcgcgcatcagccacggcgcggtgaatacgttcccgggccttgtacacaccgcccgtcaagccatgggagccgggggtacctgaagtacgtaaccgcaaggagcgtcctagggtaaaactggtgactggggctaagtcgtaacaaggtagccgtaccggaaggtgcggctggaacacctcctt

SEQ ID NO: 199 - DNA, 1514 bp, artificial sequence
  SPC12268_contig000031_3847_5360
agagtttgatcctggctcaggacgaacgctgtcggcgcgcctaacacatgcaagtcgaacgaagttgctttgaatgaattcttcggaaggaatttgattcaacttagtggcggacgggtgagtaacgcgtgagtaacctgcctttcagagggggataacgtctggaaacggacgctaataccgcataacatattggtttcgcatggagctgatatcaaaggagcaatccgctgaaagatggactcgcgtccaattagctagttggtgaggtaacggcccaccaaggcgacgattggtagccggactgagaggttgaacggccacattgggactgagacacggcccagactcctacgggaggcagcagtggggaatattgcacaatgggggaaaccctgatgcagcgacgccgagtgagggaagaaggttttcggattgtaaacctctgtccttggtgaagataatgacggtaaccaaggaggaagctacggctaactacgtgccagcagccgcggtaatacgtaggtagcgagcgttgtccggaattactgggtgtaaagggagcgtaggcgggattgcaagttgaatgttaaatctatgggctcaacccatagccgcgttcaaaactgcagttcttgagtgaagtagaggcaggcggaattcctagtgtagcggtgaaatgcgtaaatattaggaggaacaccagtggcgaaggcggcctgctgggctttaactgacgctgaggctcgaaagcgtgggtagcaaacaggattagataccctggtagtccacgctgtaaacgatgattactaggtgtggggggactgaccccttccgtgccggagttaacacaataagtaatccacctggggagtacgaccgcaaggttgaaactcaaaggaattgacgggggcccgcacaagcagtggagtatgtggtttaattcgaagcaacgcgaagaaccttaccaggtcttgacatccggtgcatagcctagagataggtgaagcccttcggggcaccgagacaggtggtgcatggttgtcgtcagctcgtgtcgtgagatgttgggttaagtcccgcaacgagcgcaacccttacgtttagttgctacgcaagagcactctagacggactgccgttgacaaaacggaggaaggtggggatgacgtcaaatcatcatgccccttatgacctgggctacacacgtactacaatggctattaacagagggaagcaagatggtgacatggagcaaacccctaaaaatagtctcagttcggattgcaggctgcaacccgcctgcatgaagccggaattgctagtaatcgcggatcagcatgccgcggtgaatacgttcccgggccttgtacacaccgcccgtcacaccatgagagttggcaacacccgaagccgatagtctaaccgcaagggggacgtcgtcgaaggtggggttgatgattggggtgaagtcgtaacaaggtagccgtatcggaaggtgcggctggatcacct

SEQ ID NO: 200 - DNA, 1522 bp, artificial sequence
  SPC10325_contig000001_273394_274915
agagtttgatcctggctcaggatgaacgctggcggcgtgcctaacacatgcaagtcgaacgaagcaattaaaatgaagttttcggatggatttttaattgactgagtggcggacgggtgagtaacgcgtggataacctgcctcacactgggggataacagttagaaatgactgctaataccgcataagcgcacagtaccgcatggtacagtgtgaaaaactccggtggtgtgagatggatccgcgtctgattagccagttggcggggtaacggcccaccaaagcgacgatcagtagccgacctgagagggtgaccggccacattgggactgagacacggcccaaactcctacgggaggcagcagtggggaatattgcacaatgggcgaaagcctgatgcagcgacgccgcgtgagtgaagaagtatttcggtatgtaaagctctatcagcagggaagaaaatgacggtacctgactaagaagccccggctaactacgtgccagcagccgcggtaatacgtagggggcaagcgttatccggatttactgggtgtaaagggagcgtagacggcgaagcaagtctgaagtgaaaacccagggctcaaccctgggactgctttggaaactgttttgctagagtgtcggagaggtaagtggaattcctagtgtagcggtgaaatgcgtagatattaggaggaacaccagtggcgaaggcggcttactggacgataactgacgttgaggctcgaaagcgtggggagcaaacaggattagataccctggtagtccacgccgtaaacgatgaatgctaggtgttggggggcaaagcccttcggtgccgtcgcaaacgcagtaagcattccacctggggagtacgttcgcaagaatgaaactcaaaggaattgacggggacccgcacaagcggtggagcatgtggtttaattcgaagcaacgcgaagaaccttaccaagtcttgacatcctcttgaccggcgtgtaacggcgccttcccttcggggcaagagagacaggtggtgcatggttgtcgtcagctcgtgtcgtgagatgttgggttaagtcccgcaacgagcgcaacccttatccttagtagccagcaggtagagctgggcactctagggagactgccagggataacctggaggaaggtggggatgacgtcaaatcatcatgccccttatgatttgggctacacacgtgctacaatggcgtaaacaaagggaggcaagacagtgatgtggagcaaatcccaaaaataacgtcccagttcggactgtagtctgcaacccgactacacgaagctggaatcgctagtaatcgcgaatcagaatgtcgcggtgaatacgttcccgggtcttgtacacaccgcccgtcacaccatgggagtcagcaacgcccgaagtcagtgacccaactcgcaagagagggagctgccgaaggcggggcaggtaactggggtgaagtcgtaacaaggtagccgtatcggaaggtgcggctggatcacct

SEQ ID NO: 201 - DNA, 1522 bp, artificial sequence
  SPC10325_contig000001_4697788_4699309
agagtttgatcctggctcaggatgaacgctggcggcgtgcctaacacatgcaagtcgaacgaagcaattaaaatgaagttttcggatggatttttaattgactgagtggcggacgggtgagtaacgcgtggataacctgcctcacactgggggataacagttagaaatgactgctaataccgcataagcgcacagtaccgcatggtacggtgtgaaaaactccggtggtgtgagatggatccgcgtctgattagccagttggcggggtaacggcccaccaaagcgacgatcagtagccgacctgagagggtgaccggccacattgggactgagacacggcccaaactcctacgggaggcagcagtggggaatattgcacaatgggcgaaagcctgatgcagcgacgccgcgtgagtgaagaagtatttcggtatgtaaagctctatcagcagggaagaaaatgacggtacctgactaagaagccccggctaactacgtgccagcagccgcggtaatacgtagggggcaagcgttatccggatttactgggtgtaaagggagcgtagacggcgaagcaagtctgaagtgaaaacccagggctcaaccctgggactgctttggaaactgttttgctagagtgtcggagaggtaagtggaattcctagtgtagcggtgaaatgcgtagatattaggaggaacaccagtggcgaaggcggcttactggacgataactgacgttgaggctcgaaagcgtggggagcaaacaggattagataccctggtagtccacgccgtaaacgatgaatgctaggtgttggggggcaaagcccttcggtgccgtcgcaaacgcagtaagcattccacctggggagtacgttcgcaagaatgaaactcaaaggaattgacggggacccgcacaagcggtggagcatgtggtttaattcgaagcaacgcgaagaaccttaccaagtcttgacatcctcttgaccggcgtgtaacggcgccttcccttcggggcaagagagacaggtggtgcatggttgtcgtcagctcgtgtcgtgagatgttgggttaagtcccgcaacgagcgcaacccttatccttagtagccagcaggtaaagctgggcactctagggagactgccagggataacctggaggaaggtggggatgacgtcaaatcatcatgccccttatgatttgggctacacacgtgctacaatggcgtaaacaaagggaagcaagacagtgatgtggagcaaatcccaaaaataacgtcccagttcggactgtagtctgcaacccgactacacgaagctggaatcgctagtaatcgcgaatcagaatgtcgcggtgaatacgttcccgggtcttgtacacaccgcccgtcacaccatgggagtcagcaacgcccgaagtcagtgacccaactcgcaagagagggagctgccgaaggcggggcaggtaactggggtgaagtcgtaacaaggtagccgtatcggaaggtgcggctggatcacct

SEQ ID NO: 202 - DNA, 1522 bp, artificial sequence; identical to SEQ ID NO: 201
  SPC10325_contig000001_4836438_4837959

SEQ ID NO: 203 - DNA, 1520 bp, artificial sequence
  SPC10325_contig000001_282201_283720
agagtttgatcctggctcaggatgaacgctggcggcgtgcctaacacatgcaagtcgaacgaagcaattgaaggaagttttcggatggaattcgattgactgagtggcggacgggtgagtaacgcgtggataacctgcctcacactgggggataacagttagaaatgactgctaataccgcataagcgcacagtaccgcatggtacagtgtgaaaaactccggtggtgtgagatggatccgcgtctgattagccagttggcggggtaacggcccaccaaagcgacgatcagtagccgacctgagagggtgaccggccacattgggactgagacacggcccaaactcctacgggaggcagcagtggggaatattgcacaatgggcgaaagcctgatgcagcgacgccgcgtgagtgaagaagtatttcggtatgtaaagctctatcagcagggaagaaaatgacggtacctgactaagaagccccggctaactacgtgccagcagccgcggtaatacgtagggggcaagcgttatccggatttactgggtgtaaagggagcgtagacggcgaagcaagtctgaagtgaaaacccagggctcaaccctgggactgctttggaaactgttttgctagagtgtcggagaggtaagtggaattcctagtgtagcggtgaaatgcgtagatattaggaggaacaccagtggcgaaggcggcttactggacgataactgacgttgaggctcgaaagcgtggggagcaaacaggattagataccctggtagtccacgccgtaaacgatgaatgctaggtgttggggggcaaagcccttcggtgccgtcgcaaacgcagtaagcattccacctggggagtacgttcgcaagaatgaaactcaaaggaattgacggggacccgcacaagcggtggagcatgtggtttaattcgaagcaacgcgaagaaccttaccaagtcttgacatcctcttgaccggcgtgtaacggcgccttcccttcggggcaagagagacaggtggtgcatggttgtcgtcagctcgtgtcgtgagatgttgggttaagtcccgcaacgagcgcaacccttatccttagtagccagcaggtagagctgggcactctagggagactgccagggataacctggaggaaggtggggatgacgtcaaatcatcatgccccttatgatttgggctacacacgtgctacaatggcgtaaacaaagggaagcaagacagtgatgtggagcaaatcccaaaaataacgtcccagttcggactgtagtctgcaacccgactacacgaagctggaatcgctagtaatcgcgaatcagaatgtcgcggtgaatacgttcccgggtcttgtacacaccgcccgtcacaccatgggagtcagcaacgcccgaagtcagtgacccaactcgcaagagagggagctgccgaaggcggggcaggtaactggggtgaagtcgtaacaaggtagccgtatcggaaggtgcggctggatcacct

SEQ ID NO: 204 - DNA, 1520 bp, artificial sequence; identical to SEQ ID NO: 203
  SPC10325_contig000002_474680_476199

SEQ ID NO: 205 - DNA, 1521 bp, artificial sequence
  SPC11090_contig000003_1033803_1035323
agagtttgatcctggctcaggatgaacgctggcggcgtgcttaacacatgcaagtcgagcgaagcactttacttagatttcttcggattgaagagtgttgtgactgagcggcggacgggtgagtaacgcgtgggtaacctgcctcatacagggggataacagttagaaatgactgctaataccgtataagaccacggtgccgcatggcacagtggtaaaaactccggtggtatgagatggacccgcgtctgattagcttgttggtaaggtaacggcttaccaaggcgacgatcagtagccgacctgagagggtgaccggccacattgggactgagacacggcccaaactcctacgggaggcagcagtggggaatattgcacaatgggggaaaccctgatgcagcgacgccgcgtgaaggatgaagtatttcggtatgtaaacttctatcagcagggaagaaaatgacggtacctgactaagaagccccggctaactacgtgccagcagccgcggtaatacgtagggggcaagcgttatccggatttactgggtgtaaagggagcgtagacggtgatgcaagtctgatgtgaaaacccggggctcaaccccgggactgcattggaaactgtgtgactagagtgtcggagaggtaagtggaattcctagtgtagcggtgaaatgcgtagatattaggaggaacaccagtggcgaaggcggcttactggacgatgactgacgttgaggctcgaaagcgtggggagcaaacaggattagataccctggtagtccacgccgtaaacgatgaatactaggtgtcgggtggcaaagccattcggtgccgcagcaaacgcagtaagtattccacctggggagtacgttcgcaagaatgaaactcaaaggaattgacggggacccgcacaagcggtggagcatgtggtttaattcgaagcaacgcgaagaaccttacctgctcttgacatcccgctgaccggccagtaatgtggccttcccttcggggcagtggagacaggtggtgcatggttgtcgtcagctcgtgtcgtgagatgttgggttaagtcccgcaacgagcgcaacccttatctttagtagccagcggtcaggccgggcactctagagagactgccagggataacctggaggaaggtggggatgacgtcaaatcatcatgccccttatgagcagggctacacacgtgctacaatggcgtaaacaaagggaagcaatactgtgaagtggagcaaatcccaaaaataacgtctcagttcggattgtagtctgcaactcgactacatgaagctggaatcgctagtaatcgcgaatcagaatgtcgcggtgaatacgttcccgggtcttgtacacaccgcccgtcacaccatgggagttggtaacgcccgaagtcagtgacccaaccgcaaggagggagctgccgaaggtgggaccgataactggggtgaagtcgtaacaaggtagccgtatcggaaggtgcggctggatcacct

SEQ ID NO: 206 - DNA, 1521 bp, artificial sequence
  SPC11090_contig000002_1861746_1863266
agagtttgatcctggctcaggatgaacgctggcggcgtgcttaacacatgcaagtcgagcgaagcactttactttgatttcttcggaatgaagagtgttgtgactgagcggcggacgggtgagtaacgcgtgggtaacctgcctcatacagggggataacagttagaaatgactgctaataccgtataagaccacagtgccgcatggcacggtggtaaaaactccggtggtatgagatggacccgcgtctgattagcttgttggtaaggtaacggcttaccaaggcgacgatcagtagccgacctgagagggtgaccggccacattgggactgagacacggcccaaactcctacgggaggcagcagtggggaatattgcacaatgggggaaaccctgatgcagcgacgccgcgtgaaggatgaagtatttcggtatgtaaacttctatcagcagggaagaaaatgacggtacctgactaagaagccccggctaactacgtgccagcagccgcggtaatacgtagggggcaagcgttatccggatttactgggtgtaaagggagcgtagacggtaatgcaagtctgatgtgaaaacccggggctcaaccccgggactgcattggaaactgtgtgactagagtgtcggagaggtaagtggaattcctagtgtagcggtgaaatgcgtagatattaggaggaacaccagtggcgaaggcggcttactggacgatgactgacgttgaggctcgaaagcgtggggagcaaacaggattagataccctggtagtccacgccgtaaacgatgaatactaggtgtcgggtggcaaagccattcggtgccgcagcaaacgcagtaagtattccacctggggagtacgttcgcaagaatgaaactcaaaggaattgacggggacccgcacaagcggtggagcatgtggtttaattcgaagcaacgcgaagaaccttacctgctcttgacatcccgctgaccggccagtaatgtggccttcccttcggggcagtggagacaggtggtgcatggttgtcgtcagctcgtgtcgtgagatgttgggttaagtcccgcaacgagcgcaacccttatctttagtagccagcggtcaggccgggcactctagagagactgccagggataacctggaggaaggtggggatgacgtcaaatcatcatgccccttatgagcagggctacacacgtgctacaatggcgtaaacaaagggaggcaatactgtgaagtggagcaaatcccaaaaataacgtctcagttcggattgtagtctgcaactcgactacatgaagctggaatcgctagtaatcgcgaatcagaatgtcgcggtgaatacgttcccgggtcttgtacacaccgcccgtcacaccatgggagttggtaacgcccgaagtcagtgacccaaccgcaaggagggagctgccgaaggtgggaccgataactggggtgaagtcgtaacaaggtagccgtatcggaaggtgcggctggatcacct

SEQ ID NO: 207 - DNA, 1521 bp, artificial sequence
  SPC11090_contig000003_979811_981331
agagtttgatcctggctcaggatgaacgctggcggcgtgcttaacacatgcaagtcgagcgaagcactttacttagatttcttcggattgaagagtgttgtgactgagcggcggacgggtgagtaacgcgtgggtaacctgcctcatacagggggataacagttagaaatgactgctaataccgtataagaccacggtgccgcatggcacagtggtaaaaactccggtggtatgagatggacccgcgtctgattagcttgttggtaaggtaacggcctaccaaggcgacgatcagtagccgacctgagagggtgaccggccacattgggactgagacacggcccaaactcctacgggaggcagcagtggggaatattgcacaatgggggaaaccctgatgcagcgacgccgcgtgaaggatgaagtatttcggtacgtaaacttctatcagcagggaagaaaatgacggtacctgactaagaagccccggctaactacgtgccagcagccgcggtaatacgtagggggcaagcgttatccggatttactgggtgtaaagggagcgtagacggtgatgcaagtctgatgtgaaaacccggggctcaaccccgggactgcattggaaactgtgtgactagagtgtcggagaggtaagtggaattcctagtgtagcggtgaaatgcgtagatattaggaggaacaccagtggcgaaggcggcttactggacgatgactgacgttgaggctcgaaagcgtggggagcaaacaggattagataccctggtagtccacgccgtaaacgatgaatactaggtgtcgggtggcaaagccattcggtgccgcagcaaacgcagtaagtattccacctggggagtacgttcgcaagaatgaaactcaaaggaattgacggggacccgcacaagcggtggagcatgtggtttaattcgaagcaacgcgaagaaccttacctgctcttgacatcccgctgaccggccagtaatgtggccttcccttcggggcagtggagacaggtggtgcatggttgtcgtcagctcgtgtcgtgagatgttgggttaagtcccgcaacgagcgcaacccctatctttagtagccagcggtcaggccgggcactctagagagactgccagggataacctggaggaaggtggggatgacgtcaaatcatcatgccccttatgagcagggctacacacgtgctacaatggcgtaaacaaagggaggcaatactgtgaagtggagcaaatcccaaaaataacgtctcagttcggattgtagtctgcaactcgactacatgaagctggaatcgctagtaatcgcgaatcagaatgtcgcggtgaatacgttcccgggtcttgtacacaccgcccgtcacaccatgggagttggtaacgcccgaagtcagtgacccaaccgcaaggagggagctgccgaaggtgggaccgataactggggtgaagtcgtaacaaggtagccgtatcggaaggtgcggctggatcacct

SEQ ID NO: 208 - DNA, 1522 bp, artificial sequence
  SPC11090_contig000003_1005010_1006531
agagtttgatcctggctcaggatgaacgctggcggcgtgcttaacacatgcaagtcgagcgaagcacaatactcaagatttcttcggattgaagagtgttgtgactgagcggcggacgggtgagtaacgcgtgggtaacctgcctcatacagggggataacagttagaaatgactgctaataccgtataagaccacagtgccgcatggcacagtggtaaaaactccggtggtatgagatggacccgcgtctgattagcttgttggtaaggtaacggcttaccaaggcgacgatcagtagccgacctgagagggtgaccggccacattgggactgagacacggcccaaactcctacgggaggcagcagtggggaatattgcacaatgggggaaaccctgatgcagcgacgccgcgtgaaggatgaagtatttcggtatgtaaacttctatcagcagggaagaaaatgacggtacctgactaagaagccccggctaactacgtgccagcagccgcggtaatacgtagggggcaagcgttatccggatttactgggtgtaaagggagcgtagacggtgatgcaagtctgatgtgaaaacccggggctcaaccccgggactgcattggaaactgtgtgactagagtgtcggagaggtaagtggaattcctagtgtagcggtgaaatgcgtagatattaggaggaacaccagtggcgaaggcggcttactggacgatgactgacgttgaggctcgaaagcgtggggagcaaacaggattagataccctggtagtccacgccgtaaacgatgaatactaggtgtcgggtggcaaagccattcggtgccgcagcaaacgcagtaagtattccacctggggagtacgttcgcaagaatgaaactcaaaggaattgacggggacccgcacaagcggtggagcatgtggtttaattcgaagcaacgcgaagaaccttacctgctcttgacatcccgctgaccggccagtaatgtggccttcccttcggggcagtggagacaggtggtgcatggttgtcgtcagctcgtgtcgtgagatgttgggttaagtcccgcaacgagcgcaacccttatctttagtagccagcggcttggccgggcactctagagagactgccagggataacctggaggaaggtggggatgacgtcaaatcatcatgccccttatgagcagggctacacacgtgctacaatggcgtaaacaaagggaggcaatactgtgaagtggagcaaatcccaaaaataacgtctcagttcggattgtagtctgcaactcgactacatgaagctggaatcgctagtaatcgcgaatcagaatgtcgcggtgaatacgttcccgggtcttgtacacaccgcccgtcacaccatgggagttggtaacgcccgaagtcagtgacccaaccgcaaggagggagctgccgaaggtgggaccgataactggggtgaagtcgtaacaaggtagccgtatcggaaggtgcggctggatcacct

SEQ ID NO: 209 - DNA, 1521 bp, artificial sequence
  SPC11090_contig000002_872151_873671
agagtttgatcctggctcaggatgaacgctggcggcgtgcttaacacatgcaagtcgagcgaagcactttacttagatttcttcggattgaagagtgttgtgactgagcggcggacgggtgagtaacgcgtgggtaacctgcctcatacagggggataacagttagaaatgactgctaataccgtataagaccacggtgccgcatggcacagtggtaaaaactccggtggtatgagatggacccgcgtctgattagctagttggtagggtaacggcttaccaaggcgacgatcagtagccgacctgagagggtgaccggccacattgggactgagacacggcccaaactcctacgggaggcagcagtggggaatattgcacaatgggggaaaccctgatgcagcgacgccgcgtgaaggatgaagtatttcggtatgtaaacttctatcagcagggaagaaaatgacggtacctgactaagaagccccggctaactacgtgccagcagccgcggtaatacgtagggggcaagcgttatccggatttactgggtgtaaagggagcgtagacggtgatgcaagtctgatgtgaaaacccggggctcaaccccgggactgcattggaaactgtgtgactagagtgtcggagaggtaagtggaattcctagtgtagcggtgaaatgcgtagatattaggaggaacaccagtggcgaaggcggcttactggacgatgactgacgttgaggctcgaaagcgtggggagcaaacaggattagataccctggtagtccacgccgtaaacgatgaatactaggtgtcgggtggcaaagccattcggtgccgcagcaaacgcagtaagtattccacctggggagtacgttcgcaagaatgaaactcaaaggaattgacggggacccgcacaagcggtggagcatgtggtttaattcgaagcaacgcgaagaaccttacctgctcttgacatcccgctgaccggccagtaatgtggccttcccttcggggcagtggagacaggtggtgcatggttgtcgtcagctcgtgtcgtgagatgttgggttaagtcccgcaacgagcgcaacccttatctttagtagccagcggtcaggccgggcactctagagagactgccagggataacctggaggaaggtggggatgacgtcaaatcatcatgccccttatgagcagggctacacacgtgctacaatggcgtaaacaaagggaggcaatactgtgaagtggagcaaatcccaaaaataacgtctcagttcggattgtagtctgcaactcgactacatgaagctggaatcgctagtaatcgcgaatcagaatgtcgcggtgaatacgttcccgggtcttgtacacaccgcccgtcacaccatgggagttggtaacgcccgaagtcagtgacccaaccgcaaggagggagctgccgaaggtgggaccgataactggggtgaagtcgtaacaaggtagccgtatcggaaggtgcggctggatcacct

SEQ ID NO: 210 - DNA, 1515 bp, artificial sequence
  SPC12429_contig000124_3871_5385
aattaagagtttgatcctggctcaggatgaacgctggcggcgtgcctaacacatgcaagtcgagcgagaagccattgactgaaacttcggtagaaggatatggtggaaagcggcggacgggtgagtaacgcgtaggcaacctgccccttacagagggatagccattggaaacgatgattaaaacctcataacgcatcccccccacatggaggggaagccaaagattcatcggtaagggatgggcctgcgtctgattagcttgttggcggggtaacggcccaccaaggcgacgatcagtagccgacctgagagggtgatcggccacattggaactgagacacggtccaaactcctacgggaggcagcagtggggaatattgcacaatgggcgaaagcctgatgcagcaacgccgcgtgagggatgaaggccttcgggtcgtaaacctctgtccttggggaagaaacaaatgacggtacccatggaggaagccccggctaactacgtgccagcagccgcggtaatacgtagggggcgagcgttatccggaattattgggcgtaaagagtgcgtaggtggttacctaagcgcagggtctaaggcaatggctcaaccattgttcgccctgcgaactgggctacttgagtgcaggagaggaaagcggaattcctagtgtagcggtgaaatgcgtagatattaggaggaacaccagtggcgaaggcggctttctggactgttactgacactgaggcacgaaagcgtggggagcaaacaggattagataccctggtagtccacgccgtaaacgatgagcactaggtgtcggggccgcaaggcttcggtgccgcagttaacgcattaagtgctccgcctggggagtacgcacgcaagtgtgaaactcaaaggaattgacggggacccgcacaagcagcggagcatgtggtttaattcgaagcaacgcgaagaaccttaccaggacttgacatcccactgacagatccctaaccggatccttcttcggacagtggagacaggtggtgcatggttgtcgtcagctcgtgtcgtgagatgttgggttaagtcccgcaacgagcgcaacccttgccattagttgccatcattcagttgggcactctaatgggactgccggggacaactcggaggaaggtggggatgacgtcaaatcatcatgccccttatgttctgggctacacacgtgctacaatggccggtacagcaagaagcaaaaccgcgaggtggagcaaatctcaaaaaccggtcccagttcggactgcaggctgaaacccgcctgcacgaagccggagttgctagtaatcgtggatcagaatgccacggtgaatgcgttcccgggtcttgtacacaccgcccgtcacaccatggaagttgggggtgcccgaagccggcagggaaatatgctgtctaaggcaaaaccaatgactggggtgaagtcgtaacaaggtagccgtatcggaaggtgcggctggatcacctccttt

SEQ ID NO: 211 - DNA, 1218 bp, artificial sequence
  SPC12299_contig000098_1_1218
gatcattaaagttgggatacaacacggatggatgagcttatggcgtattagctagtaggtgaggtaacggctcacctaggcgatgatacgtagccgacctgagagggtgaccggccacattgggactgagacacggcccaaactcctacgggaggcagcagtagggaattttcggcaatgggcgaaagcctgaccgagcaacgccgcgtgagtgaagaaggccttcgggttgtaaagctctgttgtgaaggaagaacggctcatacagggaatggtatgggagtgacggtactttaccagaaagccacggctaactacgtgccagcagccgcggtaatacgtaggtggcgagcgttatccggaattattgggcgtaaagggtgcgcaggcggttttttaagtttaaggtgaaagcgtggggcttaaccccatatagccttagaaactgagagactagagtacaggagagggcaatggaattccatgtgtagcggtaaaatgcgtagatatatggaggaacaccagtggcgaaggcggttgcctggcctgtaactgacgctcatgcacgaaagcgtggggagcaaataggattagataccctagtagtccacgccgtaaacgatgagaactaagtgttggggaaactcagtgctgcagttaacgcaataagttctccgcctggggagtatgcacgcaagtgtgaaactcaaaggaattgacgggggcccgcacaagcggtggagtatgtggtttaattcgacgcaacgcgaagaaccttaccaggtcttgacatcccctgcaaagacatagagatatgttggaggttatcagggagacaggtggtgcatggttgtcgtcagctcgtgtcgtgagatgttgggttaagtcccgcaacgagcgcaacccttgtctttagttactaacattgagttgaggactctagagagactgccggtgacaaaccggaggaaggtggggatgacgtcaaatcatcatgccccttatgacctgggctacacacgtactacaatggcggatacaacgagaagcaagacagtgatgtggagcaaaactcagaaagtccgtctcagttcggattgaagtctgcaacccgacttcatgaagccggaatcgctagtaatcgcggatcagcatgccgcggtgaatacgttctcgggccttgtacacaccgcccgtcaaaccatgagagttggcaat

SEQ ID NO: 212 - DNA, 1548 bp, artificial sequence
  SPC12435_contig000067_173_1720
tttagagagtttgatcctggctcaggacgaacgctggcggcgtgcctaacacatgcaagtcgaacggagttaaattcgacacccgagtatccggccgggaggcggggtgctgggggttggatttaacttagtggcggacgggtgagtaacgcgtgagtaacctgcctttcagagggggataacgttctgaaaagaacgctaataccgcataacatcaatttatcgcatgataggttgatcaaaggagcaatccgctggaagatggactcgcgtccgattagctagttggcggggtaacggcccaccaaagcgacgatcggtagccggactgagaggttgaacggccacattgggactgagacacggcccagactcctacgggaggcagcagtgggggatattgcacaatgggggaaaccctgatgcagcaacgccgcgtgagggaagaaggttttcggattgtaaacctctgttcttagtgacgataatgacggtagctaaggagaaagctccggctaactacgtgccagcagccgcggtaatacgtagggagcgagcgttgtccggatttactgggtgtaaagggtgcgtaggcggcgaggcaagtcaggcgtgaaatctatgggcttaacccataaactgcgcttgaaactgtcttgcttgagtgaagtagaggtaggcggaattcccggtgtagcggtgaaatgcgtagagatcgggaggaacaccagtggcgaaggcggcctactgggctttaactgacgctgaagcacgaaagcatgggtagcaaacaggattagataccctggtagtccatgccgtaaacgatgattactaggtgtggggggtctgaccccctccgtgccgcagttaacacaataagtaatccacctggggagtacggccgcaaggttgaaactcaaaggaattgacgggggcccgcacaagcagtggagtatgtggtttaattcgaagcaacgcgaagaaccttaccaggtcttgacatccgtctaacgaagcagagatgcattaggtgcccttcggggaaaggcgagacaggtggtgcatggttgtcgtcagctcgtgtcgtgagatgttgggttaagtcccgcaacgagcgcaacccttgtttctagttgctacgcaagagcactctagagagactgccgttgacaaaacggaggaaggtggggacgacgtcaaatcatcatgccccttatgacctgggccacacacgtactacaatggctgtaaacagagggaagcaaagccgcgaggcggagcaaaaccctaaaagcagtcccagttcggatcgcaggctgcaacccgcctgcgtgaagtcggaattgctagtaatcgcggatcagcatgccgcggtgaatacgttcccgggccttgtacacaccgcccgtcacaccatgggagccggtaatacccgaagccagtagttcaaccgcaaggagagcgctgtcgaaggtaggattggcgactggggtgaagtcgtaacaaggtagccgtatcggaaggtgcggctggatcacctccttt

SEQ ID NO: 213 - DNA, 1207 bp, artificial sequence
  SPC10686_contig000097_1_1207
cacattggaactgagacacggtccaaactcctacgggaggcagcagtgaggaatattggtcaatggacgagagtctgaaccagccaagtagcgtgaaggatgactgccctatgggttgtaaacttcttttatacgggaataaagttagccacgtgtggttttttgtatgtaccgtatgaataaggatcggctaactccgtgccagcagccgcggtaatacggaggatccgagcgttatccggatttattgggtttaaagggagcgtaggcgggttgttaagtcagttgtgaaagtttgcggctcaaccgtaaaattgcagttgatactggcgaccttgagtgcaacagaggtaggcggaattcgtggtgtagcggtgaaatgcttagatatcacgaagaactccgattgcgaaggcagcttactggattgtaactgacgctgatgctcgaaagtgtgggtatcaaacaggattagataccctggtagtccacacagtaaacgatgaatactcgctgttggcgatatacggtcagcggccaagcgaaagcattaagtattccacctggggagtacgccggcaacggtgaaactcaaaggaattgacgggggcccgcacaagcggaggaacatgtggtttaattcgatgatacgcgaggaaccttacccgggcttaaattgcaactgacggaatcggaaacggttctttcttcggacagttgtgaaggtgctgcatggttgtcgtcagctcgtgccgtgaggtgtcggcttaagtgccataacgagcgcaacccttacgggtagttaccatcaggttatgctggggactctacccggactgccgtcgtaagatgtgaggaaggtggggatgacgtcaaatcagcacggcccttacgtccggggctacacacgtgttacaatggggggtacagaaggcagctacacggcgacgtggtgctaatcccaaaagcctctctcagttcggattggagtctgcaacccgactccatgaagctggattcgctagtaatcgcgcatcagccacggcgcggtgaatacgttcccgggccttgtacacaccgcccgtcaagccatgaaagccgggggtacctgaagtacgtaaccgcgaggagcgtcctagggtaaaactggtgattggggctaagtcgtaacaaggtagccgtaccggaaggtgcggctggaacacct

SEQ ID NO: 214 - DNA, 1520 bp, artificial sequence; identical to SEQ ID NO: 148
  SPC10848_contig000001_396103_397622

SEQ ID NO: 215 - DNA, 1520 bp, artificial sequence; identical to SEQ ID NO: 148
  SPC10848_contig000001_1682546_1684065

SEQ ID NO: 216 - DNA, 1520 bp, artificial sequence; identical to SEQ ID NO: 148
  SPC10848_contig000001_1688793_1690312

SEQ ID NO: 217 - DNA, 1516 bp, artificial sequence
  SPC10681_contig000083_11287_12802
agagtttgatcctggctcaggacgaacgctggcggcgcgcctaacacatgcaagtcgaacggagctgttttctctgaagttttcggatggaagagagttcagcttagtggcgaacgggtgagtaacacgtgagcaacctgcctttcagtgggggacaacatttggaaacgaatgctaataccgcataagaccacagtgtcgcatggcacaggggtcaaaggatttatccgctgaaagatgggctcgcgtccgattagctagatggtgaggtaacggcccaccatggcgacgatcggtagccggactgagaggttgaacggccacattgggactgagacacggcccagactcctacgggaggcagcagtggggaatattgcacaatgggggaaaccctgatgcagcgacgccgcgtggaggaagaaggtcttcggattgtaaactcctgtcccaggggacgataatgacggtaccctgggaggaagcaccggctaactacgtgccagcagccgcggtaaaacgtagggtgcaagcgttgtccggaattactgggtgtaaagggagcgcaggcggattggcaagttgggagtgaaatctatgggctcaacccataaattgctttcaaaactgtcagtcttgagtggtgtagaggtaggcggaattcccggtgtagcggtggaatgcgtagatatcgggaggaacaccagtggcgaaggcggcctactgggcactaactgacgctgaggctcgaaagcatgggtagcaaacaggattagataccctggtagtccatgccgtaaacgatgattactaggtgtgggaggattgaccccttccgtgccgcagttaacacaataagtaatccacctggggagtacgaccgcaaggttgaaactcaaaggaattgacgggggcccgcacaagcagtggagtatgtggtttaattcgaagcaacgcgaagaaccttaccaggtcttgacatcggatgcatacctaagagattagggaagtccttcgggacatccagacaggtggtgcatggttgtcgtcagctcgtgtcgtgagatgttgggttaagtcccgcaacgagcgcaacccttatcgttagttactacgcaagaggactctagcgagactgccgttgacaaaacggaggaaggtggggatgacgtcaaatcatcatgccctttatgacctgggctacacacgtactacaatggctattaacagagagaagcgataccgcgaggtggagcaaacctcacaaaaatagtctcagttcggatcgcaggctgcaacccgcctgcgtgaagccggaattgctagtaatcgcggatcagcatgccgcggtgaatacgttcccgggccttgtacacaccgcccgtcacaccatgagagccggggggacccgaagtcggtagtctaaccgtaaggaggacgccgccgaaggtaaaactggtgattggggtgaagtcgtaacaaggtagccgtatcggaaggtgcggctggatcacct

SEQ ID NO: 218 - DNA, 1354 bp, artificial sequence
  SPC10247_cons
tccttcgggagtggattagcggcggacgggtgagtaacacgtgggtaacctgcctcatagaggggaatagcctttcgaaaggaagattaataccgcataagattgtagtaccgcatggtacagcaattaaaggagtaatccgctatgagatggacccgcgtcgcattagctagttggtgaggtaacggctcaccaaggcgacgatgcgtagccgacctgagagggtgatcggccacattgggactgagacacggcccagactcctacgggaggcagcagtggggaatattgcacaatgggggaaaccctgatgcagcaacgccgcgtgagtgatgacggtcttcggattgtaaagctctgtctttagggacgataatgacggtacctaaggaggaagccacggctaactacgtgccagcagccgcggtaatacgtaggtggcaagcgttgtccggatttactgggcgtaaagggagcgtaggtggatatttaagtgggatgtgaaatacccgggcttaacctgggtgctgcattccaaactggatatctagagtgcaggagaggaaaggagaattcctagtgtagcggtgaaatgcgtagagattaggaagaataccagtggcgaaggcgcctttctggactgtaactgacactgaggctcgaaagcgtggggagcaaacaggattagataccctggtagtccacgccgtaaacgatgaatactaggtgtaggggttgtcatgacctctgtgccgccgctaacgcattaagtattccgcctggggagtacggtcgcaagattaaaactcaaaggaattgacgggggcccgcacaagcagcggagcatgtggtttaattcgaagcaacgcgaagaaccttacctagacttgacatctcctgaattactctgtaatggaggaagccacttcggtggcaggaagacaggtggtgcatggttgtcgtcagctcgtgtcgtgagatgttgggttaagtcccgcaacgagcgcaacccttattgttagttgctaccatttagttgagcactctagcgagactgcccgggttaaccgggaggaaggtggggatgacgtcaaatcatcatgccccttatgtctagggctacacacgtgctacaatggtcggtacaatgagatgcaacctcgcgagagtgagcaaaactataaaaccgatctcagttcggattgtaggctgaaactcgcctacatgaagctggagttgctagtaatcgcgaatcagaatgtcgcggtgaatacgttcccgggccttgtacacaccgcccgtcacaccatgagagttggcaatacccaaagttcgtgagctaaccgcaaggagg

SEQ ID NO: 219 - DNA, 1338 bp, artificial sequence; identical to SEQ ID NO: 13
  SPC10606_cons
  misc_feature (917)..(917): n is a, c, g, or t

SEQ ID NO: 220 - DNA, 1370 bp, artificial sequence; identical to SEQ ID NO: 10
  SPC11092_cons
  misc_feature (22)..(22): n is a, c, g, or t

SEQ ID NO: 221 - DNA, 1355 bp, artificial sequence
  SPC11116_cons
  misc_feature (938)..(942): n is a, c, g, or t
ccttcggggtggattagcggcggacgggtgagtaacacgtgggtaacctgccttgtagagggggatagccttccgaaaggaagattaataccgcataacatctttttatcgcatggtagaaagatcaaaggagcaatccgctacaagatggacccgcggcgcattagctagttggtgaggtaacggctcaccaaggcgacgatgcgtagccgacctgagagggtgatcggccacattggaactgagacacggtccagactcctacgggaggcagcagtggggaatattgcgcaatgggggaaaccctgacgcagcaacgccgcgtgaatgaagaaggccttagggttgtaaagttctgtttacggggacgataatgacggtacccgtggaggaagccacggctaactacgtgccagcagccgcggtaatacgtaggtggcaagcgttgtccggatttactgggcgtaaaggatgcgtaggcggatgtttaagtgagatgtgaaatacccgggctcaacttgggtgctgcatttcaaactggacatctagagtgcgggagaggaaagcggaattcctagtgtagcggtgaaatgcgtagagattaggaagaacaccagtggcgaaggcggctttctggaccgtaactgacgctgaggcatgaaagcgtggggagcaaacaggattagataccctggtagtccacgccgtaaacgatgaatactaggtgtaggaggtatcgactccttctgtgccgcagttaacacaataagtattccgcctgggaagtacgatcgcaagattaaaactcaaaggaattgacgggggcccgcacaagcagcggagcatgtggtttaattcgaagcaacgcgaagaaccttacctagacttgacatctcctgaattacccttaatcggggaagcccttcggggcaggaagnnnnnacaggtggtgcatggttgtcgtcagctcgtgtcgtgagatgttgggttaagtcccgcaacgagcgcaacccttatcattagttgctaccattaagttgagcactctagtgagactgccacggttaacgtggaggaaggtggggatgacgtcaaatcatcatgccccttatgtctagggctacacacgtgctacaatggtgaatacaaatagatgcaataccgcgaggtggagccaaactataaaattcatcccagttcggattgcagtctgaaactcgactgcatgaagccggagttgctagtaatcgcgaatcagcatgtcgcggtgaatacgttcccgggccttgtacacaccgcccgtcacaccatgagagctggtaacacccgaagtccgtgaggtaaccgcaaggagc

SEQ ID NO: 222 - DNA, 1374 bp, artificial sequence; identical to SEQ ID NO: 11
  SPC11222_cons
  misc_feature (908)..(908): n is a, c, g, or t
  misc_feature (914)..(916): n is a, c, g, or t
  misc_feature (918)..(920): n is a, c, g, or t
  misc_feature (933)..(936): n is a, c, g, or t
  misc_feature (939)..(939): n is a, c, g, or t
  misc_feature (958)..(958): n is a, c, g, or t

SEQ ID NO: 223 - DNA, 1351 bp, artificial sequence
  SPC12117_1705171A02_cons
  misc_feature (22)..(22): n is a, c, g, or t
aagaggagcttgctcctcggancagtggcggacgggtgagtaacacgtgagcaacctggctctaagagggggacaacagttggaaacgactgctaataccgcataacgtatcgggatggcatcttcctgataccaaagattttatcgcttagagatgggctcgcgtctgattagatagttggcggggtaacggcccaccaagtcgacgatcagtagccggactgagaggttgaacggccacattgggactgagacacggcccagactcctacgggaggcagcagtgggggatattggacaatgggggcaaccctgatccagcgacgccgcgtgagggaagaaggttttcggattgtaaacctctgttgacggagaaaaaaatgatggtatccgtttagaaagccacggctaactacgtgccagcagccgcggtaatacgtaggtggcaagcgttgtccggaattactgggtgtaaagggagtgtaggcgggatatcaagtcagaagtgaaaattacgggctcaactcgtaacctgcttttgaaactgacattcttgagtgaagtagaggcaagcggaattcctagtgtagcggtgaaatgcgtagatattaggaggaacaccagtggcgaaggcggcttgctgggcttttactgacgctgaggctcgaaagcgtggggagcaaacaggattagataccctggtagtccacgccgtaaacgatgattactaggtgtggggggattgaccccttccgtgccggagtaaacacaataagtaatccacctggggagtacgaccgcaaggttgaaactcaaaggaattgacgggggcccgcacaagcagtggagtatgtggtttaattcgacgcaacgcgaagaaccttaccaggtcttgacatcgagtgaccgcctaagagattaggctttcccttcggggacacaaagacaggtggtgcatggttgtcgtcagctcgtgtcgtgagatgttgggttaagtcccgcaacgagcgcaacccttatcattagttgctacgcaagagcactctaatgagactgccgttgacaaaacggaggaaggtggggatgacgtcaaatcatcatgccctttatgacctgggctacacacgtactacaatggcgtttaacaaagagaagcaaagccgcgaggcagagcaaatctccaaaaaacgtctcagttcggattgtaggctgcaactcgcctacatgaagtcggaattgctagtaatcgtaggtcagcatactacggtgaatacgttcccgggccttgtacacaccgcccgtcaaaccatgagagttggcaacacccgaagtcggtagtctaaccgcaagg

SEQ ID NO: 224 - DNA, 1378 bp, artificial sequence
  SPC12242_1803146D05_cons
  misc_feature (20)..(21): n is a, c, g, or t
  misc_feature (27)..(27): n is a, c, g, or t
  misc_feature (35)..(35): n is a, c, g, or t
tcgagcgaagcacttatgannagattncttcggantgatccatttgtgactgagcggcggacgggtgagtaacgcgtgagtaacctgcctcatacaggggaataacagttagaaatgactgctaatgccgcataagcgcacagggccacatggtctggtgtgaaaaactccggtggtatgagatggactcgcgtctgattagctggttggtgaggtaacggcccaccaaggcgacgatcagtagccggcctgagagggtgaacggccacattgggactgagacacggcccaaactcctacgggaggcagcagtggggaatattgcacaatgggggaaaccctgatgcagcgacgccgcgtgagtgaagaagtatttcggtatgtaaagctctatcagcagggaagaaaatgacggtacctgactaagaagccccggctaactacgtgccagcagccgcggtaatacgtagggggcaagcgttatccggatttactgggtgtaaagggagcgtagacggctttgcaagtctgacgtgaaaatccggggctcaaccccggaactgcgttggaaactgtgaggcttgagtgccggagaggtaagcggaattcctagtgtagcggtgaaatgcgtagatattaggaggaacaccagtggcgaaggcggcttactggacggcaactgacgttgaggctcgaaagcgtggggagcaaacaggattagataccctggtagtccacgccgtaaacgatgaatactaggtgttgggggacaaagtccttcggtgccgccgcaaacgcattaagtattccacctggggagtacgttcgcaagaatgaaactcaaaggaattgacggggacccgcacaagcggtggagcatgtggtttaattcgaagcaacgcgaagaaccttaccaagtcttgacatcgattcgacgggactgtaatgagtcctttcccttcggggacgaagaagacaggtggtgcatggttgtcgtcagctcgtgtcgtgagatgttgggttaagtcccgcaacgagcgcaacccttattttcagtagccagcaagtgaagttgggcactctggagagactgccagggacaacctggaggaaggtggggatgacgtcaaatcatcatgccccttatgacttgggctacacacgtgctacaatggcgtaaacaaagggaagcagccctgtgaaggtgagcaaatcccaaaaataacgtctcagttcggattgtagtctgcaactcgactacatgaagctggaatcgctagtaatcgcgaatcagaatgtcgcggtgaatacgttcccgggtcttgtacacaccgcccgtcacaccatgggagtcggtaacgcccgaagtcagtgaccc

SEQ ID NO: 225 - DNA, 1374 bp, artificial sequence
  SPC12380_1805184E01_cons
  misc_feature (20)..(20): n is a, c, g, or t
cgacgaagcactttattacnatttcttcggaatgacgatttaggtgactgagtggcggacgggtgagtaacgcgtgggtaacctgccttatacagggggataacagttagaaatgactgctaataccgcataagcgcacaggattgcatgatctggtgtgaaaaactccggtggtataagatggacccgcgtctgattagctggttggtgaggtaacggcccaccaaggcgacgatcagtagccgacctgagagggtgaccggccacattgggactgagacacggcccaaactcctacgggaggcagcagtggggaatattgcacaatgggggaaaccctgatgcagcgacgccgcgtgagcgaagaagtatttcggtatgtaaagctctatcagcagggaagaaaaaaatgacggtacctgactaaaaagccccggctaactacgtgccagcagccgcggtaatacgtagggggcaagcgttatccggatttactgggtgtaaagggagcgcaggcggtgcggcaagtctgatgtgaaagcccggggctcaaccccgggactgcattggaaactgtcgtacttgagtatcggagaggtaagtggaattcctagtgtagcggtgaaatgcgtagatattaggaggaacaccagtggcgaaggcggcttactggacgataactgacgctgaggctcgaaagcgtggggagcaaacaggattagataccctggtagtccacgccgtaaacgatgaatactaggtgtcgggggacatagtccttcggtgccgcagcaaacgcaataagtattccacctggggagtacgttcgcaagaatgaaactcaaaggaattgacggggacccgcacaagcggtggagcatgtggtttaattcgaagcaacgcgaagaaccttaccaagtcttgacatcccggtgacaaagtatgtaatgtactctttcttcggaacaccggtgacaggtggtgcatggttgtcgtcagctcgtgtcgtgagatgttgggttaagtcccgcaacgagcgcaacccctgttcttagtagccagcggttcggccgggcactctagggagactgccagggataacctggaggaaggcggggatgacgtcaaatcatcatgccccttatgacttgggctacacacgtgctacaatggcgtaaacaaagggaagcgaaaaggtgacttctagcaaatcccaaaaataacgtcccagttcggactgtagtctgcaactcgactacacgaagctggaatcgctagtaatcgcgaatcagaatgtcgcggtgaatacgttcccgggtcttgtacacaccgcccgtcacaccatgggagtcgggaatgcccgaagccggtgac

SEQ ID NO: 226 - DNA, 1383 bp, artificial sequence
  SPC12410_1806011E07_cons
gtcgaacgaagcattttgaatgaagttttcggatggattttagagagtgactgagtggcggacgggtgagtaacacgtggataacctgcctcacactgggggacaacagttagaaatgactgctaataccgcataagcgcacagtaccgcatggtacagtgtgaaaaactccggtggtgtgagatggatccgcgtctgattagccagttggcggggtaacggcccaccaaagcgacgatcagtagccgacctgagagggtgaccggccacattgggactgagacacggcccaaactcctacgggaggcagcagtggggaatattgcacaatgggcgaaagcctgatgcagcgacgccgcgtgagtgaagaagtatttcggtatgtaaagctctatcagcagggaagataatgacggtacctgactaagaagccccggctaactacgtgccagcagccgcggtaatacgtagggggcaagcgttatccggatttactgggtgtaaagggagcgtagacggcatggcaagtctgaagtgaaaacccagggctcaaccctgggactgctttggaaactgtcaagctagagtgcaggagaggtaagtggaattcctagtgtagcggtgaaatgcgtagatattaggaggaacaccagtggcgaaggcggcttactggactgtaactgacgttgaggctcgaaagcgtggggagcaaacaggattagataccctggtagtccacgccgtaaacgatgagtgctaggtgttggggggcaaagcccttcggtgccgtcgcaaacgcaataagcactccacctggggagtacgttcgcaagaatgaaactcaaaggaattgacggggacccgcacaagcggtggagcatgtggtttaattcgaagcaacgcgaagaaccttaccaagtcttgacatccttttgaccggcgtgtaacggcgcctttccttcgggacaagagagacaggtggtgcatggttgtcgtcagctcgtgtcgtgagatgttgggttaagtcccgcaacgagcgcaacccttatccttagtagccagcattaagatgggcactctagggagactgccagggacaacctggaggaaggtggggatgacgtcaaatcatcatgccccttatgatttgggctacacacgtgctacaatggcgtaaacaaagggaagcgaccctgcgaaggtgagcaaatctcaaaaataacgtcccagttcggactgtagtctgcaacccgactacacgaagctggaatcgctagtaatcgcgaatcagaatgtcgcggtgaatacgttcccgggtcttgtacacaccgcccgtcacaccatgggagtcagcaacgcccgaagtcagtgacccaactcgca

SEQ ID NO: 227 - DNA, 1341 bp, artificial sequence
  PPC00248
  misc_feature (28)..(29): n is a, c, g, or t
  misc_feature (32)..(32): n is a, c, g, or t
  misc_feature (35)..(35): n is a, c, g, or t
  misc_feature (1330)..(1331): n is a, c, g, or t
tcgcttccgggtgagagtggcgaacggnngantantgcgtgaccgacctgccccatacaccggaatagctcctggaaacgggtggtaatgccggatgctccggttggatgcatgtccttccgggaaagattccatcggtatgggatggggtcgcgtcctatcagcttgatggcggggtaacggcccaccatggcttcgacgggtagccggcctgagagggcgaccggccacattgggactgagatacggcccagactcctacgggaggcagcagtggggaatattgcacaatgggcgcaagcctgatgcagcgacgccgcgtgcgggatggaggccttcgggttgtaaaccgcttttgatcgggagcaagcccttcggggtgagtgtacctttcgaataagcaccggctaactacgtgccacagccgcggaatactggggagcgttatccggaattattgggcgtaaagggctcgtaggcggttcgtcgcgtccggtgtgaaagcccatcgcttaacggtgggtctgcgccgggtacgggcgggctggagtgcggtaggggagactggaattcccggtgtaacggtggaatgtgtagatatcgggaagaacaccaatggcgaaggcaggtctctgggccgtcactgacgctgaggagcgaaagcgtggggagcgaacaggattagataccctggtagtccacgccgtaaacggtggatgctggatgtggggcccgttccacgggttccgtgtcggactaacgcgttaagcatcccgcctgggagtacggccgcaaggctaaaactcaaagaaattgacgggggcccgcacaagcggcggagcatgcggattagtgcgatgcaacgcgaagaaatttacctgggcttgacatgttcccgacggccgtagagatatggcctcccttcggggcgggttcacaggtggtgcatggtcgtcgtcagctcgtgtcgtgagatgttgggttaagtcccgcaacgagcgcaaccctcgccctgtgttgccagcacgtcatggtgggaactcacgggggaccgccggggtcaactcggaggaaggtggggatgacgtcagatcatcatgccccttacgtccagggcttcacgcatgctacaatggccggtacagcgggatgcgacatggcgacatggagcggatccctgaaaaccggtctcagttcggattggagtctgcaacccgactccatgaaggcggagtcgctagtaatcgcggatcagcaacgccgcggtgaatgcgttcccgggccttgtacacaccgcccgtcaagtcatgaaagtgggcagcacccgaanncggtggccta

SEQ ID NO: 228 - DNA, 1511 bp, artificial sequence
  >GCA_900066985|GJCOKCDC_01860 16S ribosomal RNA
atgagagttcgatcctggctcaggataaacgctggcggcgtgcttaacacatgcaagtcgaacgaagtttttctttcgggaggaacttagtggcggacgggtgagtaacgcgtgggtaacctgccctgtacagggggacaacagctggaaacggctgctaataccgcataagcccttagcactgcatggtgcatagggaaaaggagcaatccggtacaggatggacccgcgtctgattagccagttggcagggtaacggcctaccaaagcgacgatcagtagccgatctgagaggatgtacggccacattgggactgagacacggcccagactcctacgggaggcagcagtggggaatattgcacaatggaggaaactctgatgcagcgacgccgcgtgagtgaagaagtatttcggtatgtaaagctctatcagcagggaagaaaatgacggtacctgactaagaagcaccggctaaatacgtgccagcagccgcggtaatacgtatggtgcaagcgttatccggatttactgggtgtaaagggagcgtaggtggcaaggcaagccagaagtgaaaacccggggctcaaccgcgggattgcttttggaactgtcatgctagagtgcaggaggggtgagcggaattcctagtgtagcggtgaaatgcgtagatattaggaggaacaccggaggcgaaggcggctcactggactgtaactgacactgaggctcgaaagcgtggggagcaaacaggattagataccctggtagtccacgcggtaaacgatgaatactagatgtcgggtagcaaagctactcggtgtcgtcgcaaacgcaataagtattccacctggggagtacgttcgcaagaatgaaactcaaaggaattgacggggacccgcacaagcggtggagcatgtggtttaattcgaagcaacgcgaagaaccttacctgctcttgacatcccattcgatagagggtaatgcctctagcccttcgggggaatggagacaggtggtgcatggttgtcgtcagctcgtgtcgtgagatgttgggttaagtcccgcaacgagcgcaacccttattgtcagtagccagcaggtgaagctgggcactctgatgagactgccggggataacccggaggaaggtggggatgacgtcaaatcatcatgccccttatgagcagggctacacacgtgctacaatggcgtaaacagagggaagcgaaggagtgatccggagcaaatctcaaaaataacgtctcagttcggattgtagtctgcaactcgactacatgaagctggaatcgctagtaatcgcagatcagaatgctgcggtgaatacgttcccgggtcttgtacacaccgcccgtcacaccatgggagtcggtaatgcccgaagtcagtgactcaaccgaaaggagagagctgccgaaggcaggactggtaactggggtgaagtcgtaacaaggtagccgtatcggaaggtgcggctggatcacctccttt

SEQ ID NO: 229 - DNA, 981 bp, artificial sequence
  >GCF_000332875|NAGOKMPI_00536 16S ribosomal RNA (partial)
acctaccctgtacagggggataacagtcagaaatgactgctaataccgcataagaccacagcaccgcatggtgcaggggtaaaaactccggtggtacaggatggacccgcgtctgattagctggttggtgaggtaacggctcaccaaggcgacgatcagtagccggcttgagagagtgaacggccacattgggactgagacacggcccaaactcctacgggaggcagcagtggggaatattgcacaatgggggaaaccctgatgcagcgacgccgcgtgagtgaagaagtatctcggtatgtaaagctctatcagcagggaagaaaatgacggtacctgactaagaagccccggctaactacgtgccagcagccgcggtaatacgtagggggcaagcgttatccggaattactgggtgtaaagggtgcgtaggtggtatggcaagtcagaagtgaaaacccagggcttaactctgggactgcttttgaaactgtcagactggagtgcaggagaggtaagcggaattcctagtgtagcggtgaaatgcgtagatattaggaggaacatcagtggcgaaggcggcttactggactgaaactgacactgaggcacgaaagcgtggggagcaaacaggattagataccctggtagtccacgccgtaaacgatgaatactaggtgtcggggccgtagaggcttcggtgccgcagccaacgcagtaagtattccacctggggagtacgttcgcaagaatgaaactcaaaggaattgacggggacccgcacaagcggtggagcatgtggtttaattcgaagcaacgcgaagaaccttacctggtcttgacatccttctgaccggtccttaaccggacctttccttcgggacaggagagacaggtggtgcatggttgtcgtcagctcgtgtcgtgagatgttgggttaagtcccgcaacgagcgcaacccctatctttagtagccagca

SEQ ID NO: 230 - DNA, 1521 bp, artificial sequence
  >GCF_000154565|LGGPEELJ_00246 16S ribosomal RNA
caaagagtttgatcctggctcaggacgaacgctggcggcgcgcctaacacatgcaagtcgaacggagcttacgttttgaagttttcggatggatgaatgtaagcttagtggcggacgggtgagtaacacgtgagcaacctgcctttcagagggggataacagccggaaacggctgctaataccgcatgatgttgcgggggcacatgcccctgcaaccaaaggagcaatccgctgaaagatgggctcgcgtccgattagccagttggcggggtaacggcccaccaaagcgacgatcggtagccggactgagaggttgaacggccacattgggactgagacacggcccagactcctacgggaggcagcagtgggggatattgcacaatgggcgaaagcctgatgcagcgacgccgcgtgagggaagacggtcttcggattgtaaacctctgtctttggggaagaaaatgacggtacccaaagaggaagctccggctaactacgtgccagcagccgcggtaatacgtagggagcaagcgttgtccggaattactgggtgtaaagggagcgtaggcgggatggcaagtagaatgttaaatccatcggctcaaccggtggctgcgttctaaactgccgttcttgagtgaagtagaggcaggcggaattcctagtgtagcggtgaaatgcgtagatattaggaggaacaccagtggcgaaggcggcctgctgggctttaactgacgctgaggctcgaaagcgtggggagcaaacaggattagataccctggtagtccacgccgtaaacgatgattactaggtgtggggggactgaccccttccgtgccgcagttaacacaataagtaatccacctggggagtacggccgcaaggttgaaactcaaaggaattgacgggggcccgcacaagcagtggagtatgtggtttaattcgaagcaacgcgaagaaccttaccaggtcttgacatcggatgcatagcctagagataggtgaagcccttcggggcatccagacaggtggtgcatggttgtcgtcagctcgtgtcgtgagatgttgggttaagtcccgcaacgagcgcaacccttattattagttgctacgcaagagcactctaatgagactgccgttgacaaaacggaggaaggtggggatgacgtcaaatcatcatgccccttatgacctgggctacacacgtactacaatggcactaaaacagagggcggcgacaccgcgaggtgaagcgaatcccgaaaaagtgtctcagttcagattgcaggctgcaacccgcctgcatgaagtcggaattgctagtaatcgcggatcagcatgccgcggtgaatacgttcccgggccttgtacacaccgcccgtcacaccatgggagtcggtaacacccgaagccagtagcctaaccgcaaggggggcgctgtcgaaggtgggattgatgactggggtgaagtcgtaacaaggtagccgtatcggaaggtgcggctggatcacctccttt

SEQ ID NO: 231 - DNA, 1023 bp, artificial sequence
  >GCF_000154565|LGGPEELJ_03488 16S ribosomal RNA (partial)
tcaaagagtttgatcctggctcaggacgaacgctggcggcgcgcctaacacatgcaagtcgaacggagcttacgttttgaagttttcggatggatgaatgtaagcttagtggcggacgggtgagtaacacgtgagcaacctgcctttcagagggggataacagccggaaacggctgctaataccgcatgatgttgcgggggcacatgcccctgcaaccaaaggagcaatccgctgaaagatgggctcgcgtccgattagccagttggcggggtaacggcccaccaaagcgacgatcggtagccggactgagaggttgaacggccacattgggactgagacacggcccagactcctacgggaggcagcagtgggggatattgcacaatgggcgaaagcctgatgcagcgacgccgcgtgagggaagacggtcttcggattgtaaacctctgtctttggggaagaaaatgacggtacccaaagaggaagctccggctaactacgtgccagcagccgcggtaatacgtagggagcaagcgttgtccggaattactgggtgtaaagggagcgtaggcgggatggcaagtagaatgttaaatccatcggctcaaccggtggctgcgttctaaactgccgttcttgagtgaagtagaggcaggcggaattcctagtgtagcggtgaaatgcgtagatattaggaggaacaccagtggcgaaggcggcctgctgggctttaactgacgctgaggctcgaaagcgtggggagcaaacaggattagataccctggtagtccacgccgtaacgatgattactaggtgtggggggactgaccccttccgtgccgcagttaacacataagtaatccacctggggagtacggccgcaggtgaactcaaggattgacggggcccgcacagcagtgagtatgtggtttatcgagcacgcgagactacagtctgacatcgatgcatagctagagatagtgagccctcgggcatccagacaggtgggtgcatgggtgtcg

SEQ ID NO: 232 - DNA, 1521 bp, artificial sequence; identical to SEQ ID NO: 230
  >GCF_000154565|LGGPEELJ_03644 16S ribosomal RNA

SEQ ID NO: 233 - DNA, 1528 bp, artificial sequence
  >SPC10875|CFFINBFL_03530 16S ribosomal RNA
tcagagagtttgatcctggctcaggatgaacgctggcggcgtgcttaacacatgcaagtcgaacggggattatttcattgaagcttcggcagatttggtttaatcctagtggcggacgggtgagtaacgcgtgggtaacctgccttatacagggggataacagtcagaaatggctgctaataccgcataagcgcacagggccgcatggcccggtgtgaaaaactgaggtggtataagatggacccgcgttggattagccagttggcagggtaacggcctaccaaagcgacgatccatagccggcctgagagggtgaacggccacattgggactgagacacggcccagactcctacgggaggcagcagtggggaatattgcacaatgggggaaaccctgatgcagcgacgccgcgtgaaggaagaagtatctcggtatgtaaacttctatcagcagggaagaaaatgacggtacctgactaagaagccccggctaactacgtgccagcagccgcggtaatacgtagggggcaagcgttatccggatttactgggtgtaaagggagcgtagacggcataacaagtctgatgtgaaaggctggggcttaaccccgggactgcattggaaactgttaagcttgagtgccggaggggtaagcggaattcctagtgtagcggtgaaatgcgtagatattaggaggaacaccagtggcgaaggcggcttactggacggtaactgacgttgaggctcgaaagcgtggggagcaaacaggattagataccctggtagtccacgccgtaaacgatgaatactaggtgtcggggagcacagctcttcggtgccgccgcaaacgcattaagtattccacctggggagtacgttcgcaagaatgaaactcaaaggaattgacggggacccgcacaagcggtggagcatgtggtttaattcgaagcaacgcgaagaaccttaccaagtcttgacatctgcctgaccggtgagtaacgtcacctttccttcgggacaggcaagacaggtggtgcatggttgtcgtcagctcgtgtcgtgagatgttgggttaagtcccgcaacgagcgcaacccctatccccagtagccagcatgtaaaggtgggcactctgaggagactgccagggataacctggaggaaggtggggatgacgtcaaatcatcatgccccttatgatttgggctacacacgtgctacaatggcgtaaacagagggaagcgaaagggtgacctggagcaaatcccaaaaataacgtcccagttcggactgtagtctgcaacccgactacacgaagctggaatcgctagtaatcgcggatcagaatgccgcggtgaatacgttcccgggtcttgtacacaccgcccgtcacaccatgggagtcagtaacgcccgaagtcagtgacctaaccgaaagggaggagctgccgaaggcgggacggatgactggggtgaagtcgtaacaaggtagccgtatcggaaggtgcggctggatcacctccttt

SEQ ID NO: 234 - DNA, 1526 bp, artificial sequence; identical to SEQ ID NO: 37
  >SPC10877|OHAPKBMM_03334 16S ribosomal RNA

SEQ ID NO: 235 - DNA, 1526 bp, artificial sequence; identical to SEQ ID NO: 38
  >SPC10877|OHAPKBMM_03923 16S ribosomal RNA

SEQ ID NO: 236 - DNA, 1306 bp, artificial sequence
  >GCA_900066145|PMHAHBNF_02229 16S ribosomal RNA
ctccggtggtataagatggacccgcgttggattagctagttggcagggcagcggcctaccaaggcgacgatccatagccggcctgagagggtgaacggccacattgggactgagacacggcccagactcctacgggaggcagcagtggggaatattgcacaatgggggaaaccctgatgcagcgacgccgcgtgaaggaagaagtatctcggtatgtaaacttctatcagcagggaagataatgacggtacctgactaagaagccccggctaactacgtgccagcagccgcggtaatacgtagggggcgagcgttatccggatttactgggtgtaaagggagcgtagacggcgtatcaagtctgatgtgaaaggcaggggcttaacccctggactgcattggaaactggtatgcttgagtgccggaggggtaagcggaattcctagtgtagcggtgaaatgcgtagatattaggaggaacaccagtggcgaaggcggcttactggacggtaactgacgttgaggctcgaaagcgtggggagcaaacaggattagataccctggtagtccacgccgtaaacgatgaatactaggtgtctgggagcacagctcttaggtgccgccgcaaacgcattaagtattccacctggggagtacgttcgcaagaatgaaactcaaaggaattgacggggacccgcacaagcggtggagcatgtggtttaattcgaagcaacgcgaagaaccttaccaaatcttgacatccctctgacagagtatgtaatgtacttttccttcgggacaggggagacaggtggtgcatggttgtcgtcagctcgtgtcgtgagatgttgggttaagtcccgcaacgagcgcaacccctatccttagtagccagcaagtaatgttgggcactctgaggagactgccagggataacctggaggaaggcggggatgacgtcaaatcatcatgccccttatgatttgggctacacacgtgctacaatggcgtaaacaaagggaagcgaacctgtgagggtgggcaaatctcaaaaataacgtcccagttcggactgcagtctgcaactcgactgcacgaagctggaatcgctagtaatcgcggatcagaatgccgcggtgaatacgttcccgggtcttgtacacaccgcccgtcacaccatgggagtcagtaacgcccgaagtcagtgacctaaccgtaaggaaggagctgccgaaggcgggacggatgactggggtgaagtcgtaacaaggtagccgtatcggaaggtgcggctggatcacctccttt

SEQ ID NO: 237 - DNA, 1512 bp, artificial sequence
  >GCA_900066945|BALMHCNO_04340 16S ribosomal RNA
  misc_feature (194)..(194): n is a, c, g, or t
tattgagagtttgatcctggctcaggacgaacgctggcggcatgcctaacacatgcaagtcgagcgagttgatctcttcggagtgaagctagcggcggacgggtgagtaacacgtgggcaacctgcctcatagaggggaatagcctcccgaaagggagattaataccgcataagattgtagcttcgcatgaagnagcaattaaaggagcaatccgctatgagatgggcccgcggcgcattagctagttggtgaggtaacggctcaccaaggcgacgatgcgtagccgacctgagagggtgatcggccacattgggactgagacacggcccagactcctacgggaggcagcagtggggaatattgcacaatgggggaaaccctgatgcagcaatgccgcgtgagtgatgacggccttcgggttgtaaagctctgtcttcggggacgataatgacggtacccgaggaggaagccacggctaactacgtgccagcagccgcggtaatacgtaggtggcaagcgttgtccggatttactgggcgtaaagggagcgtaggcggatttttaagtgagatgtgaaatacccgggcttaacttgggtgctgcatttcaaactggaagtctagagtgcaggagaggagaagggaattcctagtgtagcggtgaaatgcgtagagattaggaagaacaccagtggcgaaggcgcttctctggactgtaactgacgctgaggctcgaaagcgtggggagcaaacaggattagataccctggtagtccacgccgtaaacgatgaatactaggtgtaggggttgtcatgacctctgtgccgccgctaacgcattaagtattccgcctggggagtacggtcgcaagattaaaactcaaaggaattgacgggggcccgcacaagcagcggagcatgtggtttaattcgaagcaacgcgaagaaccttacctagacttgacatctcctgcattacccttaatcggggaagtcgcttcggcgacaggaagacaggtggtgcatggttgtcgtcagctcgtgtcgtgagatgttgggttaagtcccgcaacgagcgcaacccttattgttagttgctaccatttagttgagcactctagcgagactgcccgggttaaccgggaggaaggtggggatgacgtcaaatcatcatgccccttatgtctagggctacacacgtgctacaatggcaagtacaaagagaagcaagaccgcgaggtggagcaaaactcaaaaacttgtctcagttcggattgtaggctgaaactcgcctacatgaagctggagttgctagtaatcgcgaatcagcatgtcgcggtgaatacgttcccgggccttgtacacaccgcccgtcacaccatgagagttggcaatacccaaagtgcgtgatctaactcgtaagagaggaagcgccctaaggtagggtcagcgattggggtgaagtcgtaacaaggtagccgtaggagaacctgcggctggatcacctccttt

SEQ ID NO: 238 - DNA, 1530 bp, artificial sequence
  >GCF_000157975|IJDEOKBJ_00014 16S ribosomal RNA
cagagagtttgatcctggctcaggatgaacgctggcggcgtgcttaacacatgcaagtcgaacgaagcgatagagaacggagatttcggttgaagttttctattgactgagtggcggacgggtgagtaacgcgtgggtaacctgccctatacagggggataacagttagaaatgactgctaataccgcataagcgcacagcttcgcatgaagcggtgtgaaaaactgaggtggtataggatggacccgcgttggattagctagttggtgaggtaacggcccaccaaggcgacgatccatagccggcctgagagggtgaacggccacattgggactgagacacggcccaaactcctacgggaggcagcagtggggaatattgcacaatgggggaaaccctgatgcagcgacgccgcgtgaaggaagaagtatctcggtatgtaaacttctatcagcagggaagaaagtgacggtacctgactaagaagccccggctaattacgtgccagcagccgcggtaatacgtaaggggcaagcgttatccggatttactgggtgtaaagggagcgtagacggtttggcaagtctgatgtgaaaggcatgggctcaacctgtggactgcattggaaactgtcagacttgagtgccggagaggcaagcggaattcctagtgtagcggtgaaatgcgtagatattaggaggaacaccagtggcgaaggcggcctgctggacggtaactgacgttgaggctcgaaagcgtggggagcaaacaggattagataccctggtagtccacgctgtaaacgatgaatactaggtgtcgggtggcaaagccattcggtgccgcagcaaacgcaataagtattccacctggggagtacgttcgcaagaatgaaactcaaaggaattgacggggacccgcacaagcggtggagcatgtggtttaattcgaagcaacgcgaagaaccttaccaaatcttgacatccctctgaccgggaagtaatgttcccttttcttcggaacagaggagacaggtggtgcatggttgtcgtcagctcgtgtcgtgagatgttgggttaagtcccgcaacgagcgcaacccttattcttagtagccagcaggtagagctgggcactctagggagactgccagggataacctggaggaaggtggggatgacgtcaaatcatcatgccccttatgatttgggctacacacgtgctacaatggcgtaaacaaagggaagcgaaggggtgacctggagcaaatctcaaaaataacgtctcagttcggattgtagtctgcaactcgactacatgaagctggaatcgctagtaatcgcgaatcagaatgtcgcggtgaatacgttcccgggtcttgtacacaccgcccgtcacaccatgggagtcagtaacgcccgaagtcagtgacccaaccgaaaggagggagctgccgaaggtgggactgataactggggtgaagtcgtaacaaggtagccgtatcggaaggtgcggctggatcacctccttt

SEQ ID NO: 239 - DNA, 1521 bp, artificial sequence
  >SPC11532|contig000121_183_1703
agagtttgatcctggctcaggatgaacgctggcggcgtgcttaacacatgcaagtcgagcgaagcacttaaacggatctcttcggattgaagcttttgtgactgagcggcggacgggtgagtaacgcgtgggtaacctgcctcatacagggggataacagttagaaatggctgctaataccgcataagcgcacaggaccgcatggtctggtgtgaaaaactccggtggtatgagatggacccgcgtctgattagctagttggaggggtaacggcccaccaaggcgacgatcagtagccggcctgagagggtgaacggccacattgggactgagacacggcccagactcctacgggaggcagcagtggggaatattgcacaatgggggaaaccctgatgcagcgacgccgcgtgaaggaagaagtatctcggtatgtaaacttctatcagcagggaagaaaatgacggtacctgactaagaagccccggctaactacgtgccagcagccgcggtaatacgtagggggcaagcgttatccggatttactgggtgtaaagggagcgtagacggaagagcaagtctgatgtgaaaggctggggcttaaccccaggactgcattggaaactgtttttctagagtgccggagaggtaagcggaattcctagtgtagcggtgaaatgcgtagatattaggaggaacaccagtggcgaaggcggcttactggacggtaactgacgttgaggctcgaaagcgtggggagcaaacaggattagataccctggtagtccacgccgtaaacgatgaatactaggtgtcgggtggcaaagccattcggtgccgcagcaaacgcaataagtattccacctggggagtacgttcgcaagaatgaaactcaaaggaattgacggggacccgcacaagcggtggagcatgtggtttaattcgaagcaacgcgaagaaccttaccaagtcttgacatccctctgaccggcccgtaacggggccttcccttcggggcagaggagacaggtggtgcatggttgtcgtcagctcgtgtcgtgagatgttgggttaagtcccgcaacgagcgcaacccctatccttagtagccagcaggtgaagctgggcactctagggagactgccggggataacccggaggaaggcggggacgacgtcaaatcatcatgccccttatgatttgggctacacacgtgctacaatggcgtaaacaaagggaagcgagacagcgatgttgagcaaatcccaaaaataacgtcccagttcggactgcagtctgcaactcgactgcacgaagctggaatcgctagtaatcgcgaatcagaatgtcgcggtgaatacgttcccgggtcttgtacacaccgcccgtcacaccatgggagtcagtaacgcccgaagtcagtgacccaaccttataggagggagctgccgaaggcgggaccgataactggggtgaagtcgtaacaaggtagccgtatcggaaggtgcggctggatcacct

SEQ ID NO: 240 - DNA, 1528 bp, artificial sequence
  >GCF_000159975|GCAHHPIP_00057 16S ribosomal RNA
tcagagagtttgatcctggctcaggatgaacgctggcggcgtgcttaacacatgcaagtcgaacgggaattactttattgaaacttcggtcgatttaatttaattctagtggcggacgggtgagtaacgcgtgggtaacctgccttatacagggggataacagtcagaaatggctgctaataccgcataagcgcacagagctgcatggctcagtgtgaaaaactccggtggtataagatggacccgcgttggattagctagttggtggggtaacggcccaccaaggcgacgatccatagccggcctgagagggtgaacggccacattgggactgagacacggcccagactcctacgggaggcagcagtggggaatattgcacaatgggggaaaccctgatgcagcgacgccgcgtgaaggaagaagtatctcggtatgtaaacttctatcagcagggaagatagtgacggtacctgactaagaagccccggctaactacgtgccagcagccgcggtaatacgtagggggcaagcgttatccggatttactgggtgtaaagggagcgtagacggtgtggcaagtctgatgtgaaaggcatgggctcaacctgtggactgcattggaaactgtcatacttgagtgccggaggggtaagcggaattcctagtgtagcggtgaaatgcgtagatattaggaggaacaccagtggcgaaggcggcttactggacggtaactgacgttgaggctcgaaagcgtggggagcaaacaggattagataccctggtagtccacgccgtaaacgatgaatactaggtgtcgggtggcagagccattcggtgccgtcgcaaacgcagtaagtattccacctggggagtacgttcgcaagaatgaaactcaaaggaattgacggggacccgcacaagcggtggagcatgtggtttaattcgaagcaacgcgaagaaccttaccaagtcttgacatccgcctgactgatccttaaccggatctttccttcgggacaggcgagacaggtggtgcatggttgtcgtcagctcgtgtcgtgagatgttgggttaagtcccgcaacgagcgcaacccctatcctcagtagccagcatttaaggtgggcactctggggagactgccagggataacctggaggaaggcggggatgacgtcaaatcatcatgccccttatgatttgggctacacacgtgctacaatggcgtaaacaaagggaagcgagattgtgagatggagcaaatcccaaaaataacgtcccagttcggactgtagtctgcaacccgactacacgaagctggaatcgctagtaatcgcggatcagaatgccgcggtgaatacgttcccgggtcttgtacacaccgcccgtcacaccatggggagtcagtaacgcccgaagtcagtgacctaaccgaaagggaggagctgccgaaggcgggaccgatgactggggtgaagtcgtaacaaggtagccgtatcggaaggtgcggctggatcacctccttt

SEQ ID NO: 241 - DNA, 1526 bp, artificial sequence
  >GCF_000159975|GCAHHPIP_00330 16S ribosomal RNA
cagagagtttgatcctggctcaggatgaacgctggcggcgtgcttaacacatgcaagtcgaacgggaattactttattgaaacttcggtcgatttaatttaattctagtggcggacgggtgagtaacgcgtgggtaacctgccttatacagggggataacagtcagaaatggctgctaataccgcataagcgcacagagctgcatggctcagtgtgaaaaactccggtggtataagatggacccgcgttggattagctagttggtggggtaacggcccaccaaggcgacgatccatagccggcctgagagggtgaacggccacattgggactgagacacggcccagactcctacgggaggcagcagtggggaatattgcacaatgggggaaaccctgatgcagcgacgccgcgtgaaggaagaagtatctcggtatgtaaacttctatcagcagggaagatagtgacggtacctgactaagaagccccggctaactacgtgccagcagccgcggtaatacgtagggggcaagcgttatccggatttactgggtgtaaagggagcgtagacggtgtggcaagtctgatgtgaaaggcatgggctcaacctgtggactgcattggaaactgtcatacttgagtgccggaggggtaagcggaattcctagtgtagcggtgaaatgcgtagatattaggaggaacaccagtggcgaaggcggcttactggacggtaactgacgttgaggctcgaaagcgtggggagcaaacaggattagataccctggtagtccacgccgtaaacgatgaatactaggtgtcggggagcatggctcttcggtgccgtcgcaaacgcagtaagtattccacctggggagtacgttcgcaagaatgaaactcaaaggaattgacggggacccgcacaagcggtggagcatgtggtttaattcgaagcaacgcgaagaaccttaccaagtcttgacatccgcctgaccgatccttaaccggatctttccttcgggacaggcgagacaggtggtgcatggttgtcgtcagctcgtgtcgtgagatgttgggttaagtcccgcaacgagcgcaacccctatcctcagtagccagcatttaaggtgggcactctggggagactgccagggataacctggaggaaggcggggatgacgtcaaatcatcatgccccttatgatttgggctacacacgtgctacaatggcgtaaacaaagggaagcgagattgtgagatggagcaaatcccaaaaataacgtcccagttcggactgtagtctgcaacccgactacacgaagctggaatcgctagtaatcgcggatcagaatgccgcggtgaatacgttcccgggtcttgtacacaccgcccgtcacaccatgggagtcagtaacgcccgaagtcagtgacctaactgcaaagaaggagctgccgaaggcgggaccgatgactggggtgaagtcgtaacaaggtagccgtatcggaaggtgcggctggatcacctccttt

SEQ ID NO: 242 - DNA, 1526 bp, artificial sequence
  >GCF_000159975|GCAHHPIP_00407 16S ribosomal RNA
cagagagtttgatcctggctcaggatgaacgctggcggcgtgcttaacacatgcaagtcgaacgggaattactttattgaaacttcggtcgatttaatttaattctagtggcggacgggtgagtaacgcgtgggtaacctgccttatacagggggataacagtcagaaatggctgctaataccgcataagcgcacagagctgcatggctcagtgtgaaaaactccggtggtataagatggacccgcgttggattagctggttggtggggtaacggcccaccaaggcgacgatccatagccggcctgagagggtgaacggccacattgggactgagacacggcccagactcctacgggaggcagcagtggggaatattgcacaatgggggaaaccctgatgcagcgacgccgcgtgaaggaagaagtatctcggtatgtaaacttctatcagcagggaagatagtgacggtacctgactaagaagccccggctaactacgtgccagcagccgcggtaatacgtagggggcaagcgttatccggatttactgggtgtaaagggagcgtagacggtgtggcaagtctgatgtgaaaggcatgggctcaacctgtggactgcattggaaactgtcatacttgagtgccggaggggtaagcggaattcctagtgtagcggtgaaatgcgtagatattaggaggaacaccagtggcgaaggcggcttactggacggtaactgacgttgaggctcgaaagcgtggggagcaaacaggattagataccctggtagtccacgccgtaaacgatgaatactaggtgtcgggtagcatagctcttcggtgccgtcgcaaacgcagtaagtattccacctggggagtacgttcgcaagaatgaaactcaaaggaattgacggggacccgcacaagcggtggagcatgtggtttaattcgaagcaacgcgaagaaccttaccaagtcttgacatccctctgaccgaaacttaatcggatctttccttcgggacagacgagacaggtggtgcatggttgtcgtcagctcgtgtcgtgagatgttgggttaagtcccgcaacgagcgcaacccctatcctcagtagccagcatttaaggtgggcactctggggagactgccagggataacctggaggaaggcggggatgacgtcaaatcatcatgccccttatgatttgggctacacacgtgctacaatggcgtaaacaaagggaagcgagattgtgagatggagcaaatcccaaaaataacgtcccagttcggactgtagtctgcaacccgactacacgaagctggaatcgctagtaatcgcggatcagaatgccgcggtgaatacgttcccgggtcttgtacacaccgcccgtcacaccatgggagtcagtaacgcccgaagtcagtgacctaactgcaaagaaggagctgccgaaggcgggaccgatgactggggtgaagtcgtaacaaggtagccgtatcggaaggtgcggctggatcacctccttt

SEQ ID NO: 243 - DNA, 1325 bp, artificial sequence
  >GCF_000159975|GCAHHPIP_02849 16S ribosomal RNA
tcagagagtttgatcctggctcaggatgaacgctggcggcgtgcttaacacatgcaagtcgaacgggaaatatttcattgagacttcggtggatttgatctatttctagtggcggacgggtgagtaacgcgtgggtaacctgccttatacagggggataacagtcagaaatggctgctaataccgcataagcgcacagagctgcatggctcagtgtgaaaaactccggtggtataagatggacccgcgttggattagctggttggtggggtaacggcccaccaaggcgacgatccatagccggcctgagagggtgaacggccacattgggactgagacacggcccagactcctacgggaggcagcagtggggaatattgcacaatgggggaaaccctgatgcagcgacgccgcgtgaaggaagaagtatctcggtatgtaaacttctatcagcagggaagatagtgacggtacctgactaagaagccccggctaactacgtgccagcagccgcggtaatacgtagggggcaagcgttatccggatttactgggtgtaaagggagcgtagacggtgtggcaagtctgatgtgaaaggcatgggctcaacctgtggactgcattggaaactgtcatacttgagtgccggaggggtaagcggaattcctagtgtagcggtgaaatgcgtagatattaggaggaacaccagtggcgaaggcggcttactggacggtaactgacgttgaggctcgaaagcgtggggagcaaacaggattagataccctggtagtccacgccgtaaacgatgaatactaggtgtcggggagcatggctcttcggtgccgtcgcaaacgcagtaagtattccacctggggagtacgttcgcaagaatgaaactcaaaggaattgacggggacccgcacaagcggtggagcatgtggtttaattcgaagcaacgcgaagaaccttaccaagtcttgacatccgcctgaccgatccttaaccggatctttccttcgggacaggcgagacaggtggtgcatggttgtcgtcagctcgtgtcgtgagatgttgggttaagtcccgcaacgagcgcaacccctatcctcagtagccagcatttaaggtgggcactctggggagactgccagggataacctggaggaaggcggggatgacgtcaaatcatcatgccccttatgatttgggctacacacgtgctacaatggcgtaaacaaagggaagcgagattgtgagatggagcaaatcccaaaaataacgtcccagttcggactgtagtctgcaacccgactacacgaagctggaa

SEQ ID NO: 244 - DNA, 1526 bp, artificial sequence; identical to SEQ ID NO: 241
  >GCF_000159975|GCAHHPIP_03032 16S ribosomal RNA

SEQ ID NO: 245 - DNA, 1527 bp, artificial sequence
  >GCF_000159975|GCAHHPIP_03150 16S ribosomal RNA
tcagagagtttgatcctggctcaggatgaacgctggcggcgtgcttaacacatgcaagtcgaacgggaattactttattgaaacttcggtcgatttaatttaattctagtggcggacgggtgagtaacgcgtgggtaacctgccttatacagggggataacagtcagaaatggctgctaataccgcataagcgcacagagctgcatggctcagtgtgaaaaactccggtggtataagatggacccgcgttggattagcttgttggtgaggtaacggcccaccaaggcgacgatccatagccggcctgagagggtgaacggccacattgggactgagacacggcccagactcctacgggaggcagcagtggggaatattgcacaatgggggaaaccctgatgcagcgacgccgcgtgaaggaagaagtatctcggtatgtaaacttctatcagcagggaagatagtgacggtacctgactaagaagccccggctaactacgtgccagcagccgcggtaatacgtagggggcaagcgttatccggatttactgggtgtaaagggagcgtagacggtgtggcaagtctgatgtgaaaggcatgggctcaacctgtggactgcattggaaactgtcatacttgagtgccggaggggtaagcggaattcctagtgtagcggtgaaatgcgtagatattaggaggaacaccagtggcgaaggcggcttactggacggtaactgacgttgaggctcgaaagcgtggggagcaaacaggattagataccctggtagtccacgccgtaaacgatgaatactaggtgtcggggagcatggctcttcggtgccgtcgcaaacgcagtaagtattccacctggggagtacgttcgcaagaatgaaactcaaaggaattgacggggacccgcacaagcggtggagcatgtggtttaattcgaagcaacgcgaagaaccttaccaagtcttgacatccctctgaccggaacttaatcgttcctttccttcgggacagaggagacaggtggtgcatggttgtcgtcagctcgtgtcgtgagatgttgggttaagtcccgcaacgagcgcaacccctatcctcagtagccagcatttaaggtgggcactctggggagactgccagggataacctggaggaaggcggggatgacgtcaaatcatcatgccccttatgatttgggctacacacgtgctacaatggcgtaaacaaagggaagcgagattgtgagatggagcaaatcccaaaaataacgtcccagttcggactgtagtctgcaacccgactacacgaagctggaatcgctagtaatcgcggatcagaatgccgcggtgaatacgttcccgggtcttgtacacaccgcccgtcacaccatgggagtcagtaacgcccgaagtcagtgacctaactgcaaagaaggagctgccgaaggcgggaccgatgactggggtgaagtcgtaacaaggtagccgtatcggaaggtgcggctggatcacctccttt

SEQ ID NO: 246 - DNA, 1527 bp, artificial sequence
  >GCF_000159975|GCAHHPIP_03212 16S ribosomal RNA
tcagagagtttgatcctggctcaggatgaacgctggcggcgtgcttaacacatgcaagtcgaacgggaaatatttcattgagacttcggtggatttgatctatttctagtggcggacgggtgagtaacgcgtgggtaacctgccttatacagggggataacagtcagaaatggctgctaataccgcataagcgcacagagctgcatggctcagtgtgaaaaactccggtggtataagatggacccgcgttggattagctggttggtggggtaacggcccaccaaggcgacgatccatagccggcctgagagggtgaacggccacattgggactgagacacggcccagactcctacgggaggcagcagtggggaatattgcacaatgggggaaaccctgatgcagcgacgccgcgtgaaggaagaagtatctcggtatgtaaacttctatcagcagggaagatagtgacggtacctgactaagaagccccggctaactacgtgccagcagccgcggtaatacgtagggggcaagcgttatccggatttactgggtgtaaagggagcgtagacggtgtggcaagtctgatgtgaaaggcatgggctcaacctgtggactgcattggaaactgtcatacttgagtgccggaggggtaagcggaattcctagtgtagcggtgaaatgcgtagatattaggaggaacaccagtggcgaaggcggcttactggacggtaactgacgttgaggctcgaaagcgtggggagcaaacaggattagataccctggtagtccacgccgtaaacgatgaatactaggtgtcgggtggcagagccattcggtgccgtcgcaaacgcagtaagtattccacctggggagtacgttcgcaagaatgaaactcaaaggaattgacggggacccgcacaagcggtggagcatgtggtttaattcgaagcaacgcgaagaaccttaccaagtcttgacatccctctgaccggaacttaatcgttcctttccttcgggacagaggagacaggtggtgcatggttgtcgtcagctcgtgtcgtgagatgttgggttaagtcccgcaacgagcgcaacccctatcctcagtagccagcatttaaggtgggcactctggggagactgccagggataacctggaggaaggcggggatgacgtcaaatcatcatgccccttatgatttgggctacacacgtgctacaatggcgtaaacaaagggaagcgagattgtgagatggagcaaatcccaaaaataacgtcccagttcggactgtagtctgcaacccgactacacgaagctggaatcgctagtaatcgcggatcagaatgccgcggtgaatacgttcccgggtcttgtacacaccgcccgtcacaccatgggagtcagtaacgcccgaagtcagtgacctaactgcaaagaaggagctgccgaaggcgggaccgatgactggggtgaagtcgtaacaaggtagccgtatcggaaggtgcggctggatcacctccttt

SEQ ID NO: 247 - DNA, 1372 bp, artificial sequence
  >GCF_000159975|BJEPPOBG_03390 16S ribosomal RNA
tcagagagtttgatcctggctcaggatgaacgctggcggcgtgcttaacacatgcaagtcgaacgggaaatatttcattgagacttcggtggatttgatctatttctagtggcggacgggtgagtaacgcgtgggtaacctgccttatacagggggataacagtcagaaatggctgctaataccgcataagcgcacagagctgcatggctcagtgtgaaaaactccggtggtataagatggacccgcgttggattagctagttggtggggtaacggcccaccaaggcgacgatccatagccggcctgagagggtgaacggccacattgggactgagacacggcccagactcctacgggaggcagcagtggggaatattgcacaatgggggaaaccctgatgcagcgacgccgcgtgaaggaagaagtatctcggtatgtaaacttctatcagcagggaagatagtgacggtacctgactaagaagccccggctaactacgtgccagcagccgcggtaatacgtagggggcaagcgttatccggatttactgggtgtaaagggagcgtagacggtgtggcaagtctgatgtgaaaggcatgggctcaacctgtggactgcattggaaactgtcatacttgagtgccggaggggtaagcggaattcctagtgtagcggtgaaatgcgtagatattaggaggaacaccagtggcgaaggcggcttactggacggtaactgacgttgaggctcgaaagcgtggggagcaaacaggattagataccctggtagtccacgccgtaaacgatgaatactaggtgtcgggtggcagagccattcggtgccgtcgcaaacgcagtaagtattccacctggggagtacgttcgcaagaatgaaactcaaaggaattgacggggacccgcacaagcggtggagcatgtggtttaattcgaagcaacgcgaagaaccttaccaagtcttgacatccgcctgaccgatccttaaccggatctttccttcgggacaggcgagacaggtggtgcatggttgtcgtcagctcgtgtcgtgagatgttgggttaagtcccgcaacgagcgcaacccctatcctcagtagccagcatttaaggtgggcactctggggagactgccagggataacctggaggaaggcggggatgacgtcaaatcatcatgccccttatgatttgggctacacacgtgctacaatggcgtaaacaaagggaagcgagattgtgagatggagcaaatcccaaaaataacgtcccagttcggactgtagtctgcaacccgactacacgaagctggaatcgctagtaatcgcggatcagaatgccgcggtgaatacgttcccggg

SEQ ID NO: 248 - DNA, 1531 bp, artificial sequence; identical to SEQ ID NO: 39
  >GCF_000313565|GNHMFION_03462 16S ribosomal RNA

SEQ ID NO: 249 - DNA, 1527 bp, artificial sequence
  >GCF_000155435|GLJCGDOH_00018 16S ribosomal RNA
tttgagagtttgatcctggctcaggatgaacgctggcggcgtgcctaacacatgcaagtcgaacgaagcatcttataggaagttttcggatggaatatgggatgactgagtggcggacgggtgagtaacgcgtggataacctgcctcacactgggggataacagttagaaatggctgctaataccgcataagcgcacagtaccgcatggtacggtgtgaaaaacccaggtggtgtgagatggatccgcgtctgattagccagttggcggggtaacggcccaccaaagcgacgatcagtagccgacctgagagggtgaccggccacattgggactgagacacggcccaaactcctacgggaggcagcagtggggaatattgcacaatgggcgaaagcctgatgcagcgacgccgcgtgagtgaagaagtatctcggtatgtaaagctctatcagcagggaagaaaatgacggtacctgactaagaagccccggctaactacgtgccagcagccgcggtaatacgtagggggcaagcgttatccggatttactgggtgtaaagggagcgtagacggcgatgcaagtctgaagtgaaagcccggggctcaaccccgggactgctttggaaactgtgtggctggagtgcaggagaggtaagtggaattcctagtgtagcggtgaaatgcgtagatattaggaggaacaccagtggcgaaggcggcttactggactgtaactgacgttgaggctcgaaagcgtggggagcaaacaggattagataccctggtagtccacgccgtaaacgatgaatgctaggtgtcggggggcaaagcccctcggtgccgccgctaacgcaataagcattccacctggggagtacgttcgcaagaatgaaactcaaaggaattgacggggacccgcacaagcggtggagcatgtggtttaattcgaagcaacgcgaagaaccttaccaagtcttgacatccccctgaccggacagtaacgtgtcccttccttcgggacaggggagacaggtggtgcatggttgtcgtcagctcgtgtcgtgagatgttgggttaagtcccgcaacgagcgcaacccttatccttagtagccagcatttcgggtgggcactctagggagactgccagggataacctggaggaaggtggggatgacgtcaaatcatcatgccccttatgatttgggctacacacgtgctacaatggcgtaaacaaagggaagcaccctgcgaaggtgagcaaatcccaaaaataacgtcccagttcggactgtagtctgcaacccgactacacgaagctggaatcgctagtaatcgcggatcagaatgccgcggtgaatacgttcccgggtcttgtacacaccgcccgtcacaccatgggagtcagcaacgcccgaagtcagtgacccaaccgaaaggagggagctgccgaaggcggggcaggtaactggggtgaagtcgtaacaaggtagccgtatcggaaggtgcggctggatcacctccttt

SEQ ID NO: 250 - DNA, 1522 bp, artificial sequence; identical to SEQ ID NO: 47
  >GCA_900066915|NFPLMCGC_00592 16S ribosomal RNA

SEQ ID NO: 251 - DNA, 1526 bp, artificial sequence; identical to SEQ ID NO: 48
  >GCA_900066805|HEBHMANF_02162 16S ribosomal RNA

SEQ ID NO: 252 - DNA, 1527 bp, artificial sequence
  >GCA_900066575|JHFIFLEE_00174 16S ribosomal RNA
atgagagtttgatcctggctcaggatgaacgctggcggcgtgcttaacacatgcaagtcgaacgaagcgcttaagattgattcttcggatgaagtcttttgtgactgagtggcggacgggtgagtaacgcgtgggtaacctgcctcatacagggggataacagttagaaatgactgctaataccgcataagcgcacggtgtcgcatgacatagtgtgaaaaactccggtggtatgagatggacccgcgtctgattagctggttggtgaggtaacggcccaccaaggcgacgatcagtagccgacctgagagggtgatcggccacattgggactgagacacggcccaaactcctacgggaggcagcagtggggaatattgcacaatgggggaaaccctgatgcagcgacgccgcgtgaaggaagaagtatttcggtatgtaaacttctatcagcagggaagaaaatgacggtacctgactaagaagccccggctaactacgtgccagcagccgcggtaatacgtagggggcaagcgttatccggatttactgggtgtaaagggagcgtaggcggtctgacaagtcagaagtgaaagcccggggctcaactccgggactgcttttgaaactgccggactagattgcaggagaggtaagtggaattcctagtgtagcggtgaaatgcgtagatattaggaggaacaccagtggcgaaggcggcttactggactgtaaatgacgctgaggctcgaaagcgtggggagcaaacaggattagataccctggtagtccacgccgtaaacgatgaatactaggtgttggggagcacagctcttcggtgccgcagcaaacgcaataagtattccacctggggagtacgttcgcaagaatgaaactcaaaggaattgacggggacccgcacaagcggtggagcatgtggtttaattcgaagcaacgcgaagaaccttaccaagtcttgacatcccgatgaccgtcccgtaacgggggcttctcttcggagcatcggtgacaggtggtgcatggttgtcgtcagctcgtgtcgtgagatgttgggttaagtcccgcaacgagcgcaacccttatctttagtagccagcggtacggccgggcactctagagagactgccagggataacctggaggaaggtggggatgacgtcaaatcatcatgccccttatgatttgggctacacacgtgctacaatggcgtaaacaaagggaagcgaaactgtgaagtctagcaaatctcaaaaataacgtctcagttcggattgtagtctgcaactcgactacatgaagctggaatcgctagtaatcgcgaatcagcatgtcgcggtgaatacgttcccgggtcttgtacacaccgcccgtcacaccatgggagttggaaacgcccgaagtcagtgacccaaccgtaaggagggagctgccgaaggcgggtctgataactggggtgaagtcgtaacaaggtagccgtatcggaaggtgcggctggatcacctccttt

SEQ ID NO: 253 - DNA, 1303 bp, artificial sequence
  >GCA_900066545|JJMGBGIF_00555 16S ribosomal RNA
ccggtggtatgagatggacccgcgtctgattagctggttggtggggtaacggcctaccaaggcgacgatcagtagccggcctgagagggcgaccggccacattgggactgagacacggcccaaactcctacgggaggcagcagtggggaatattgcacaatgggggaaaccctgatgcagcgacgccgcgtgaaggaagaagtatttcggtatgtaaacttctatcagcagggaagaaaatgacggtacctgactaagaagccccggctaactacgtgccagcagccgcggtaatacgtagggggcaagcgttatccggatttactgggtgtaaagggagcgtagacggagaggcaagtctgatgtgaaaacccggggctcaaccccgggactgcattggaaactgtttttctagagtgtcggagaggtaagcggaattcctagtgtagcggtgaaatgcgtagatattaggaggaacaccagtggcgaaggcggcttactggacgatgactgacgttgaggctcgaaagcgtggggagcaaacaggattagataccctggtagtccacgccgtaaacgatgactactaggtgtcgggtggcaaagccattcggtgccgcagcaaacgcaataagtagtccacctggggagtacgttcgcaagaatgaaactcaaaggaattgacggggacccgcacaagcggtggagcatgtggtttaattcgaagcaacgcgaagaaccttacctgctcttgacatcccggtgaccgctccgtaatgggagcttttcttcggaacaccggagacaggtggtgcatggttgtcgtcagctcgtgtcgtgagatgttgggttaagtcccgcaacgagcgcaacccctatcttcagtagccagcggtttggccgggcactctggagagactgccagggataacctggaggaaggtggggatgacgtcaaatcatcatgccccttatgagcagggctacacacgtgctacaatggcgtaaacaaagggaggcgaactcgcgagggtaagcaaatcccaaaaataacgtctcagttcggattgtagtctgcaactcgactacatgaagctggaatcgctagtaatcgcgaatcagaatgtcgcggtgaatacgttcccgggtcttgtacacaccgcccgtcacaccatgggagtcagtaacgcccgaagtcagtgacccaaccgtaaggagggagctgccgaaggtgggaccgataactggggtgaagtcgtaacaaggtagccgtatcggaaggtgcggctggatcacctccttt

SEQ ID NO: 254 - DNA, 1305 bp, artificial sequence; identical to SEQ ID NO: 15
  >GCA_900066055|CNDBEJEM_03146 16S ribosomal RNA

SEQ ID NO: 255 - DNA, 1558 bp, artificial sequence
  >GCA_900066535|PHPOKJPF_02817 16S ribosomal RNA
  misc_feature (992)..(1038): n is a, c, g, or t
atgagagtttgatcctggctcaggatgaacgctggcggcgtgcctaacacatgcaagtcgaacgaggtattttgattgaagttttcggatggatttcaagataccgagtggcggacgggtgagtaacgcgtgggtaacctgcctcatacagggggataacggttagaaatgactgctaataccgcataagcgcacagtaccgcatggtacggtgtgaaaaactccggtggtatgagatggacccgcgtctgattagctagttggtggggtaacggcccaccaaggcgacgatcagtagccgacctgagagggtgaccggccacattgggactgagacacggcccagactcctacgggaggcagcagtgggggatattgcacaatggaggaaactctgatgcagcgacgccgcgtgagtgaagaagtatttcggtatgtaaagctctatcagcagggaagaaaatgacggtacctgactaagaagccccggctaactacgtgccagcagccgcggtaatacgtagggggcaagcgttatccggatttactgggtgtaaagggagcgtagacggcgacgcaagtctgaagtgaaatacccgggctcaacctgggaactgctttggaaactgtgttgctagagtgctggagaggtaagcggaattcctagtgtagcggtgaaatgcgtagatattaggaagaacaccagtggcgaaggcggcttactggacagtaactgacgttgaggctcgaaagcgtggggagcaaacaggattagataccctggtagtccacgccgtaaacgatgaatactaggtgttggtgagcaaagctcatcggtgccgccgcaaacgcaataagtattccacctggggagtacgttcgcaagaatgaaactcaaaggaattgacggggacccgcacaagcggtggagcatgtggtttaattcgaagcaacgcgaagaaccttaccaaatcttgacatccctctgaaannnnnnnnnnnnnnnnnnnnnnnnnnnnnnnnnnnnnnnnnnnnnnncctccttcgggacagaggtgacaggtggtgcatggttgtcgtcagctcgtgtcgtgagatgttgggttaagtcccgcaacgagcgcaacccctattgtcagtagccagcaggtaaagctgggcactctgatgagactgccagggataacctggaggaaggtggggatgacgtcaaatcatcatgccccttatgatttgggctacacacgtgctacaatggcgtaaacaaagagaagcgagcctgcgagggggagcaaatctcaaaaataacgtctcagttcggattgtagtctgcaactcgactacatgaagctggaatcgctagtaatcgcagatcagaatgctgcggtgaatacgttcccgggtcttgtacacaccgcccgtcacaccatgggagtcggaaatgcccgaagccagtgacccaagcgaaagcagggagctgtcgaaggcaggtctgataactggggtgaagtcgtaacaaggtagccgtatcggaaggtgcggctggatcacctccttt

SEQ ID NO: 256 - DNA, 1515 bp, artificial sequence; identical to SEQ ID NO: 49
  >GCA_900066365|OIBDOBNI_03045 16S ribosomal RNA

SEQ ID NO: 257 - DNA, 1530 bp, artificial sequence
  >GCA_900066135|AINPJHCN_00778 16S ribosomal RNA
tttagagagtttgatcctggctcaggatgaacgctggcggcgtgcttaacacatgcaagtcgagcgaagcacttatggagattcttcggatgatccatttgtgactgagcggcggacgggtgagtaacgcgtgagtaacctgcctcatacaggggaataacagttagaaatgactgctaatgccgcataagcgcacagggccacatggcctggtgtgaaaaactccggtggtatgagatggactcgcgtctgattagctagttggtgaggtaacggcccaccaaggcgacgatcagtagccggcctgagagggtgaacggccacattgggactgagacacggcccaaactcctacgggaggcagcagtggggaatattgcacaatgggggaaaccctgatgcagcgacgccgcgtgagtgaagaagtatttcggtatgtaaagctctatcagcagggaagaaaatgacggtacctgactaagaagccccggctaactacgtgccagcagccgcggtaatacgtagggggcaagcgttatccggatttactgggtgtaaagggagcgtagacggctttgcaagtctgacgtgaaaatccggggctcaaccccggaactgcgttggaaactgtgaggcttgagtgccggagaggtaagcggaattcctagtgtagcggtgaaatgcgtagatattaggaggaacaccagtggcgaaggcggcttactggacggcaactgacgttgaggctcgaaagcgtggggagcaaacaggattagataccctggtagtccacgcggtaaacgatgaatactaggtgttgggggacaaagtccttcggtgccgccgcaaacgcattaagtattccacctggggagtacgttcgcaagaatgaaactcaaaggaattgacggggacccgcacaagcggtggagcatgtggtttaattcgaagcaacgcgaagaaccttaccaagtcttgacatcgattcgccgggactgtaatgagtcctttcccttcggggacgaagaagacaggtggtgcatggttgtcgtcagctcgtgtcgtgagatgttgggttaagtcccgcaacgagcgcaacccttatcttcagtagccagcaagtgaagttgggcactctggagagactgccagggacaacctggaggaaggtggggatgacgtcaaatcatcatgccccttatgacttgggctacacacgtgctacaatggcgtaaacaaagggaagcagccctgtgaaggtgagcaaatcccaaaaataacgtctcagttcggattgtagtctgcaactcgactacatgaagctggaatcgctagtaatcgcgaatcagaatgtcgcggtgaatacgttcccgggtcttgtacacaccgcccgtcacaccatgggagtcggtaacgcccgaagtcagtgacccaaccgaaaggagggagctgccgaaggcgggactggtaactggggtgaagtcgtaacaaggtagccgtatcggaaggtgcggctggatcacctccttt

SEQ ID NO: 258 - DNA, 1531 bp, artificial sequence
  >SPC11287|PIJPCPCC_02757 16S ribosomal RNA
acgagagtttgatcctggctcaggacgaacgctggcggcgtgcctaacacatgcaagtcgaacgagaatctttgaacagatcttttcggagtgacgttcaaagaggaaagtggcggacgggcgagtaacgcgtgagtaacctgcccataagagggggataatccatggaaacgtggactaataccgcatattgtagttaagttgcatgacttgattatgaaagatttatcgcttatggatggactcgcgtcagattagatagttggtgaggtaacggctcaccaagtcaacgatctgtagccgaactgagaggttgatcggccgcattgggactgagacacggcccagactcctacgggaggcagcagtggggaatattgcgcaatgggggcaaccctgacgcagcaacgccgcgtgcaggaagaaggtcttcggattgtaaactgttgtcgcaagggaagaagacagtgacggtaccttgtgagaaagtcacggctaactacgtgccagcagccgcggtaatacgtaggtgacaagcgttgtccggatttactgggtgtaaagggcgcgtaggcggactgtcaagtcagtcgtgaaataccggggcttaaccccggggctgcgattgaaactgacagccttgagtatcggagaggaaagcggaattcctagtgtagcggtgaaatgcgtagatattaggaggaacaccagtggcgaaggcggctttctggacgacaactgacgctgaggcgcgaaagtgtggggagcaaacaggattagataccctggtagtccacaccgtaaacgatggatactaggtgtaggaggtatcgaccccttctgtgccgcagttaacacaataagtatcccacctggggagtacgaccgcaaggttgaaactcaaaggaattgacgggggcccgcacaagcagtggagtatgtggtttaattcgaagcaacgcgaagaaccttacctgggcttgacatccctggaatcgagtagagatacttgagtgccttcgggaatcaggtgacaggtggtgcatggttgtcgtcagctcgtgtcgtgagatgttgggttaagtcccgcaacgagcgcaacccctattgtcagttgccatcattaagttgggcactctggcgagactgccggtgacaaatcggaggaaggtggggacgacgtcaaatcatcatgccccttatgcccagggctacacacgtactacaatggccgataacaaagtgcagcgaaaccgtgaggtggagcgaatcacaaaactcggtctcagttcagattgcaggctgcaactcgcctgcatgaagttggaattgctagtaatcgcggatcagaatgccgcggtgaatacgttcccgggccttgtacacaccgcccgtcacaccatgagagtcgataacacccgaagcctgtgagctaacctttaggaggcagcagtcgaaggtggggttgatgattggggtgaagtcgtaacaaggtagccgtatcggaaggtgcggctggatcacctccttt

SEQ ID NO: 259 - DNA, 1081 bp, artificial sequence
  >GCA_900066795|CIOLMDOO_00006 16S ribosomal RNA (partial)
  misc_feature (660)..(660): n is a, c, g, or t
acggcccagactcctacgggaggcagcagtggggaatattgcgcaatgggggaaaccctgacgcagcaacgccgcgtgattgaagaaggccttcgggttgtaaagatctttaattagggacgaaataaatgacggtacctgaagaataagctccggctaactacgtgccagcagccgcggtaatacgtagggagcaagcgttatccggatttactgggtgtaaagggcgcgcaggcgggccggtaagttggaagtgaaatctatgggcttaacccataaactgctttcaaaactgctggtcttgagtgatggagaggcaggcggaattccgtgtgtagcggtgaaatgcgtagatatacggaggaacaccagtggcgaaggcggcctgctggacattaactgacgctgaggcgcgaaagcgtggggagcaaacaggattagataccctggtagtccacgccgtaaacgatggatactaggtgtgggaggtattgaccccttccgtgccgcagttaacacaataagtatcccacctggggagtacggccgcaaggttgaaactcaaaggaattgacgggggcccgcacaagcagtggagtatgtggtttaattcgaagcaacgcgaagaaccttaccaggtcttgacatcccgatgaccgncttttcttcggaacatcggtgacaggtggtgcatggttgtcgtcagctcgtgtcgtgagatgttgggttaagtcccgcaacgagcgcaacccttacggttagttgatacgcaagatcactctagccggactgccgttgacaaaacggaggaaggtggggacgacgtcaaatcatcatgccccttatgacctgggctacacacgtactacaatggcagtcatacagagggaagcaaaaccgcgaggtggagcaaatccctaaaagctgtcccagttcagattgcaggctgcaacccgcctgcatgaagtcggaattgctagtaatcgcggatcagcatgccgcggtgaatacgttcccgggccttgtacacaccgcccgtcacaccatgagagccgtcaatacccgaagtccgtagcctaac

SEQ ID NO: 260 - DNA, 1527 bp, artificial sequence
  >GCA_900066785|BLILDEKL_00759 16S ribosomal RNA
atgagagtttgatcctggctcaggatgaacgctggcggcgtgcctaacacatgcaagtcgaacgaggtaaatgagatgaagttttcggatggattcttatttaccgagtggcggacgggtgagtaacgcgtgggtaacctgcctcatacagggggataacgattggaaacgattgctaataccgcataagcgcacagtaccacatggtacagtgtgaaaaactccggtggtatgagatggacccgcgtctgattagctagttggtgaggtaacggcccaccaaggcaacgatcagtagccgacctgagagggtgaccggccacattgggactgagacacggcccagactcctacgggaggcagcagtgggggatattgcacaatggaggaaactctgatgcagcgacgccgcgtgagtgaagaagtatttcggtatgtaaagctctatcagcagggaagaaaatgacggtacctgactaagaagccccggctaactacgtgccagcagccgcggtaatacgtagggggcaagcgttatccggatttactgggtgtaaagggagcgtagacggcgatgcaagtctgaagtgaaatacccgggctcaacctgggaactgctttggaaactgtatggctagagtgctggagaggtaagcggaattcctagtgtagcggtgaaatgcgtagatattaggaagaacaccagtggcgaaggcggcttactggacagtaactgacgttcaggctcgaaagcgtggggagcaaacaggattagataccctggtagtccacgccgtaaacgatgaatactaggtgtcgggggacaaagtctttcggtgccgccgcaaacgcaataagtattccacctggggagtacgttcgcaagaatgaaactcaaaggaattgacggggacccgcacaagcggtggagcatgtggtttaattcgaagcaacgcgaagaaccttaccaaatcttgacatccctctgaaaagcctttaatcgggctcctccttcgggacagaggtgacaggtggtgcatggttgtcgtcagctcgtgtcgtgagatgttgggttaagtcccgcaacgagcgcaacccctattgtcagtagccagcaggtaaagctgggcactctgatgagactgccagggataacctggaggaaggtggggatgacgtcaaatcatcatgccccttatgatttgggctacacacgtgctacaatggcgtaaacaaagagaggcgaagctgtgaggcagagcaaatctcaaaaataacgtctcagttcggattgtagtctgcaactcgactacatgaagctggaatcgctagtaatcgcggatcagaatgccgcggtgaatacgttcccgggtcttgtacacaccgcccgtcacaccatgggagtcggaaatgcccgaagccagtgacccaagcgaaagcagggagctgtcgaaggcaggtctgataactggggtgaagtcgtaacaaggtagccgtatcggaaggtgcggctggatcacctccttt

SEQ ID NO: 261 - DNA, 986 bp, artificial sequence
  >GCA_900066785|BLILDEKL_02871 16S ribosomal RNA (partial)
  misc_feature (1)..(1): n is a, c, g, or t
nccggatttactgggtgtaaagggtgcgtaggcggaactgcaagtcagtggtgaaatctgagggctcaaccctcaaactgccattgaaactgtggttcttgagtgaagtagaggtaggcggaattcccggtgtagcggtggaatgcgtagagatcgggaggaacaccagtggcgaaggcggcctactgggctttaactgacgctgaggcacgaaagcatgggtagcaaacaggattagataccctggtagtccatgccgtaaacgatgattactaggtgtggggggtctgaccccctccgtgccggagttaacacaataagtaatccacctggggagtacggccgcaaggttgaaactcaaaggaattgacgggggcccgcacaagcagtggagtatgtggtttaattcgacgcaacgcgaagaaccttaccaggtcttgacatccaactaacgaggtagagatacgtcaggtgcccttcggggaaagttgagacaggtggtgcatggttgtcgtcagctcgtgtcgtgagatgttgggttaagtcccgcaacgagcgcaacccttgtgattagttgctacgcaagagcactctaatcagactgccgttgacaaaacggaggaaggtggggatgacgtcaaatcatcatgccctttatgacctgggctacacacgtactacaatggccgtaaacagagagaggcgacaccgcgaggtgaagcgaaaccctaaaaacggtctcagttcggattgtaggctgcaacccgcctacatgaagttggaattgctagtaatcgcggatcagcatgccgcggtgaatacgttcccgggccttgtacacaccgcccgtcacaccatgggagccggtaatacccgaagtcagtagtctaaccgcaaggggggcgctgccgaaggtaggattggcgactggggtgaagtcgtaacaaggtagccgtatcggaaggtgcggctggatcacctccttt

SEQ ID NO: 262 - DNA, 1522 bp, artificial sequence
  >GCA_900066155|ELNAKNNH_00433 16S ribosomal RNA
taaagagtttgatcctggctcaggacgaacgctgtcggcgcgcctaacacatgcaagtcgaacgaagttgctttgaatgaattcttcggaaggaatttgattcaacttagtggcggacgggtgagtaacgcgtgagtaacctgcctttcagagggggataacgtctggaaacggacgctaataccgcataacatattggtttcgcatggagctgatatcaaaggagcaatccgctgaaagatggactcgcgtccaattagctagttggtgaggtaacggcccaccaaggcgacgattggtagccggactgagaggttgaacggccacattgggactgagacacggcccagactcctacgggaggcagcagtggggaatattgcacaatgggggaaaccctgatgcagcgacgccgagtgagggaagaaggttttcggattgtaaacctctgtccttggtgaagataatgacggtaaccaaggaggaagctacggctaactacgtgccagcagccgcggtaatacgtaggtagcgagcgttgtccggaattactgggtgtaaagggagcgtaggcgggattgcaagttgaatgttaaatctatgggctcaacccatagccgcgttcaaaactgcagttcttgagtgaagtagaggcaggcggaattcctagtgtagcggtgaaatgcgtaaatattaggaggaacaccagtggcgaaggcggcctgctgggctttaactgacgctgaggctcgaaagcgtgggtagcaaacaggattagataccctggtagtccacgctgtaaacgatgattactaggtgtggggggactgaccccttccgtgccggagttaacacaataagtaatccacctggggagtacgaccgcaaggttgaaactcaaaggaattgacgggggcccgcacaagcagtggagtatgtggtttaattcgaagcaacgcgaagaaccttaccaggtcttgacatccggtgcatagcctagagataggtgaagcccttcggggcaccgagacaggtggtgcatggttgtcgtcagctcgtgtcgtgagatgttgggttaagtcccgcaacgagcgcaacccttacgtttagttgctacgcaagagcactctagacggactgccgttgacaaaacggaggaaggtggggatgacgtcaaatcatcatgccccttatgacctgggctacacacgtactacaatggctattaacagagggaagcaagatggtgacatggagcaaacccctaaaaatagtctcagttcggattgcaggctgcaacccgcctgcatgaagccggaattgctagtaatcgcggatcagcatgccgcggtgaatacgttcccgggccttgtacacaccgcccgtcacaccatgagagttggcaacacccgaagccgatagtctaaccgcaagggggacgtcgtcgaaggtggggttgatgattggggtgaagtcgtaacaaggtagccgtatcggaaggtgcggctggatcacctccttt

SEQ ID NO: 263 - DNA, 1531 bp, artificial sequence; identical to SEQ ID NO: 40
  >SPC11276|OLKKOKAM_04952 16S ribosomal RNA

SEQ ID NO: 264 - DNA, 1527 bp, artificial sequence
  >GCF_000158075|CPLHKKGG_00605 16S ribosomal RNA
tttgagagtttgatcctggctcaggatgaacgctggcggcgtgcctaacacatgcaagtcgaacgaagcattttagatgaagttttcggatggattctgagatgactgagtggcggacgggtgagtaacacgtggataacctgcctcacactgggggacaacagttagaaatgactgctaataccgcataagcgcacagtaccgcatggtacggtgtgaaaaactccggtggtgtgagatggatccgcgtctgattagccagttggcggggtaacggcccaccaaagcgacgatcagtagccgacctgagagggtgaccggccacattgggactgagacacggcccaaactcctacgggaggcagcagtggggaatattgcacaatgggcgaaagcctgatgcagcgacgccgcgtgagtgaagaagtatttcggtatgtaaagctctatcagcagggaagataatgacggtacctgactaagaagccccggctaactacgtgccagcagccgcggtaatacgtagggggcaagcgttatccggatttactgggtgtaaagggagcgtagacggcatggcaagtctgaagtgaaaacccagggctcaaccctgggactgctttggaaactgtcaagctagagtgcaggagaggtaagtggaattcctagtgtagcggtgaaatgcgtagatattaggaggaacaccagtggcgaaggcggcttactggactgtaactgacgttgaggctcgaaagcgtggggagcaaacaggattagataccctggtagtccacgccgtaaacgatgagtgctaggtgttggggggcaaagcccttcggtgccgtcgcaaacgcaataagcactccacctggggagtacgttcgcaagaatgaaactcaaaggaattgacggggacccgcacaagcggtggagcatgtggtttaattcgaagcaacgcgaagaaccttaccaagtcttgacatccccctgaccggcgtgtaacggcgcctttccttcgggacaggggagacaggtggtgcatggttgtcgtcagctcgtgtcgtgagatgttgggttaagtcccgcaacgagcgcaacccttatccttagtagccagcattaagatgggcactctagggagactgccagggacaacctggaggaaggtggggatgacgtcaaatcatcatgccccttatgatttgggctacacacgtgctacaatggcgtaaacaaagggaagcgaccctgcgaaggtgagcaaatctcaaaaataacgtcccagttcggactgtagtctgcaacccgactacacgaagctggaatcgctagtaatcgcgaatcagaatgtcgcggtgaatacgttcccgggtcttgtacacaccgcccgtcacaccatgggagtcagcaacgcccgaagtcagtgacccaaccgaaaggagggagctgccgaaggcggggcaggtaactggggtgaagtcgtaacaaggtagccgtatcggaaggtgcggctggatcacctccttt

SEQ ID NO: 265 - DNA, 1501 bp, artificial sequence
  >GCF_000154445|GIKJCCKH_00383 16S ribosomal RNA
atttgagagtttgatcctggctcaggatgaacgctggcggcgtgcctaacacatgcaagtcgagcgattctcttcggagaagagcggcggacgggtgagtaacgcgtgggtaacctgccctgtacacacggataacataccgaaaggtatgctaatacgggataacataagaaattcgcatgtttttcttatcaaagctccggcggtacaggatggacccgcgtctgattagctagttggtgaggtaacggctcaccaaggcgacgatcagtagccgacctgagagggtgatcggccacattggaactgagacacggtccaaactcctacgggaggcagcagtggggaatattgcacaatgggcgaaagcctgatgcagcaacgccgcgtgagcgatgaaggccttcgggtcgtaaagctctgtcctcaaggaagataatgacggtacttgaggaggaagccccggctaactacgtgccagcagccgcggtaatacgtagggggctagcgttatccggatttactgggcgtaaagggtgcgtaggcggtcttttaagtcaggagtgaaaggctacggctcaaccgtagtaagctcttgaaactggaggacttgagtgcaggagaggagagtggaattcctagtgtagcggtgaaatgcgtagatattaggaggaacaccagtagcgaaggcggctctctggactgtaactgacgctgaggcacgaaagcgtggggagcaaacaggattagataccctggtagtccacgccgtaaacgatgagtactaggtgtcgggggttacccccctcggtgccgcagctaacgcattaagtactccgcctggggagtacgctcgcaagagtgaaactcaaaggaattgacggggacccgcacaagtagcggagcatgtggtttaattcgaagcaacgcgaagaaccttacctaagcttgacatccttttgaccgatgcctaatcgcatctttcccttcggggacagaagtgacaggtggtgcatggttgtcgtcagctcgtgtcgtgagatgttgggttaagtcccgcaacgagcgcaacccttgcctttagttgccatcattaagttgggcactctagagggactgccagggataacctggaggaaggtggggatgacgtcaaatcatcatgccccttatgcttagggctacacacgtgctacaatgggtggtacagagggcagcgaagtcgtgaggccaagctaatcccttaaagccattctcagttcggattgtaggctgaaactcgcctacatgaagctggagttactagtaatcgcagatcagaatgctgcggtgaatgcgttcccgggtcttgtacacaccgcccgtcacaccatgggagttgggggcgcccgaagccggctagctaaccttttggaagcggtcgtcgaaggtgaaaccaataactggggtgaagtcgtaacaaggtagccgtatcggaaggtgcggctggatcacctccttt

SEQ ID NO: 266 - DNA, 1501 bp, artificial sequence
  >GCF_000154445|GIKJCCKH_02786 16S ribosomal RNA
atttgagagtttgatcctggctcaggatgaacgctggcggcgtgcctaacacatgcaagtcgagcgattctctttggagaagagcggcggacgggtgagtaacgcgtgggtaacctgccctgtacacacggataacataccgaaaggtatgctaatacgggataacataagaaattcgcatgtttttcttatcaaagctccggcggtacaggatggacccgcgtctgattagctagttggtgaggtaacggctcaccaaggcgacgatcagtagccgacctgagagggtgatcggccacattggaactgagacacggtccaaactcctacgggaggcagcagtggggaatattgcacaatgggcgaaagcctgatgcagcaacgccgcgtgagcgatgaaggccttcgggtcgtaaagctctgtcctcaaggaagataatgacggtacttgaggaggaagccccggctaactacgtgccagcagccgcggtaatacgtagggggctagcgttatccggatttactgggcgtaaagggtgcgtaggcggtcttttaagtcaggagtgaaaggctacggctcaaccgtagtaagctcttgaaactgggggacttgagtgcaggagaggagagtggaattcctagtgtagcggtgaaatgcgtagatattaggaggaacaccagtagcgaaggcggctctctggactgtaactgacgctgaggcacgaaagcgtggggagcaaacaggattagataccctggtagtccacgccgtaaacgatgagtactagctgtcggaggttacccccttcggtggcgcagctaacgcattaagtactccgcctggggagtacgctcgcaagagtgaaactcaaaggaattgacggggacccgcacaagtagcggagcatgtggtttaattcgaagcaacgcgaagaaccttacctaagcttgacatccttttgaccgatgcctaatcgcatctttcccttcggggacagaagtgacaggtggtgcatggttgtcgtcagctcgtgtcgtgagatgttgggttaagtcccgcaacgagcgcaacccttgcctttagttgccatcattaagttgggcactctagagggactgccagggataacctggaggaaggtggggatgacgtcaaatcatcatgccccttatgcttagggctacacacgtgctacaatgggtggtacagagggcagcgaagtcgtgaggccaagctaatcccttaaagccattctcagttcggattgtaggctgaaactcgcctacatgaagctggagttactagtaatcgcagatcagaatgctgcggtgaatgcgttcccgggtcttgtacacaccgcccgtcacaccatgggagttgggggcgcccgaagccggctagctaaccttttggaagcggtcgtcgaaggtgaaaccaataactggggtgaagtcgtaacaaggtagccgtatcggaaggtgcggctggatcacctccttt

SEQ ID NO: 267 - DNA, 1169 bp, artificial sequence
  >GCF_000154445|GIKJCCKH_02787 16S ribosomal RNA (partial)
gaggcagcagtggggaatattgcacaatgggcgaaagcctgatgcagcaacgccgcgtgagcgatgaaggccttcgggtcgtaaagctctgtcctcaaggaagataatgacggtacttgaggaggaagccccggctaactacgtgccagcagccgcggtaatacgtagggggctagcgttatccggatttactgggcgtaaagggtgcgtaggcggtcttttaagtcaggagtgaaaggctacggctcaaccgtagtaagctcttgaaactggaggacttgagtgcaggagaggagagtggaattcctagtgtagcggtgaaatgcgtagatattaggaggaacaccagtagcgaaggcggctctctggactgtaactgacgctgaggcacgaaagcgtggggagcaaacaggattagataccctggtagtccacgccgtaaacgatgagtactagctgtcggaggttacccccttcggtggcgcagctaacgcattaagtactccgcctggggagtacgctcgcaagagtgaaactcaaaggaattgacggggacccgcacaagtagcggagcatgtggtttaattcgaagcaacgcgaagaaccttacctaagcttgacatccttttgaccgatgcctaatcgcatctttcccttcggggacagaagtgacaggtggtgcatggttgtcgtcagctcgtgtcgtgagatgttgggttaagtcccgcaacgagcgcaacccttgcctttagttgccatcattaagttgggcactctagagggactgccagggataacctggaggaaggtggggatgacgtcaaatcatcatgccccttatgcttagggctacacacgtgctacaatgggtggtacagagggcagcgaagtcgtgaggccaagctaatcccttaaagccattctcagttcggattgtaggctgaaactcgcctacatgaagctggagttactagtaatcgcagatcagaatgctgcggtgaatgcgttcccgggtcttgtacacaccgcccgtcacaccatgggagttgggggcgcccgaagccggctagctaaccttttggaagcggtcgtcgaaggtgaaaccaataactggggtgaagtcgtaacaaggtagccgtatcggaaggtgcggctggatcacctccttt

SEQ ID NO: 268 - DNA, 1501 bp, artificial sequence
  >GCF_000154445|GIKJCCKH_02788 16S ribosomal RNA
atttgagagtttgatcctggctcaggatgaacgctggcggcgtgcctaacacatgcaagtcgagcgatcttcttcggaagagagcggcggacgggtgagtaacgcgtgggtaacctgccctgtacacacggataacataccgaaaggtatgctaatacgggataacataagaaattcgcatgtttttcttatcaaagctccggcggtacaggatggacccgcgtctgattagctagttggtgaggtaacggctcaccaaggcgacgatcagtagccgacctgagagggtgatcggccacattggaactgagacacggtccaaactcctacgggaggcagcagtggggaatattgcacaatgggcgaaagcctgatgcagcaacgccgcgtgagcgatgaaggccttcgggtcgtaaagctctgtcctcaaggaagataatgacggtacttgaggaggaagccccggctaactacgtgccagcagccgcggtaatacgtagggggctagcgttatccggatttactgggcgtaaagggtgcgtaggcggtcttttaagtcaggagtgaaaggctacggctcaaccgtagtaagctcttgaaactggaggacttgagtgcaggagaggagagtggaattcctagtgtagcggtgaaatgcgtagatattaggaggaacaccagtagcgaaggcggctctctggactgtaactgacgctgaggcacgaaagcgtggggagcaaacaggattagataccctggtagtccacgccgtaaacgatgagtactagctgtcggaggttacccccttcggtggcgcagctaacgcattaagtactccgcctggggagtacgctcgcaagagtgaaactcaaaggaattgacggggacccgcacaagtagcggagcatgtggtttaattcgaagcaacgcgaagaaccttacctaagcttgacatccttttgaccgatgcctaatcgcatctttcccttcggggacagaagtgacaggtggtgcatggttgtcgtcagctcgtgtcgtgagatgttgggttaagtcccgcaacgagcgcaacccttgcctttagttgccatcattaagttgggcactctagagggactgccagggataacctggaggaaggtggggatgacgtcaaatcatcatgccccttatgcttagggctacacacgtgctacaatgggtggtacagagggcagcgaagtcgtgaggccaagctaatcccttaaagccattctcagttcggattgtaggctgaaactcgcctacatgaagctggagttactagtaatcgcagatcagaatgctgcggtgaatgcgttcccgggtcttgtacacaccgcccgtcacaccatgggagttgggggcgcccgaagccggctagctaaccttttggaagcggtcgtcgaaggtgaaaccaataactggggtgaagtcgtaacaaggtagccgtatcggaaggtgcggctggatcacctccttt

SEQ ID NO: 269 - DNA, 1501 bp, artificial sequence
  >GCF_000154445|GIKJCCKH_02812 16S ribosomal RNA
atttgagagtttgatcctggctcaggatgaacgctggcggcgtgcctaacacatgcaagtcgagcgattctcttcggagaagagcggcggacgggtgagtaacgcgtgggtaacctgccctgtacacacggataacataccgaaaggtatgctaatacgggataacataagaaattcgcatgtttttcttatcaaagctccggcggtacaggatggacccgcgtctgattagctagttggtgaggtaacggctcaccaaggcgacgatcagtagccgacctgagagggtgatcggccacattggaactgagacacggtccaaactcctacgggaggcagcagtggggaatattgcacaatgggcgaaagcctgatgcagcaacgccgcgtgagcgatgaaggccttcgggtcgtaaagctctgtcctcaaggaagataatgacggtacttgaggaggaagccccggctaactacgtgccagcagccgcggtaatacgtagggggctagcgttatccggatttactgggcgtaaagggtgcgtaggcggtcttttaagtcaggagtgaaaggctacggctcaaccgtagtaagctcttgaaactggaggacttgagtgcaggagaggagagtggaattcctagtgtagcggtgaaatgcgtagatattaggaggaacaccagtagcgaaggcggctctctggactgtaactgacgctgaggcacgaaagcgtggggagcaaacaggattagataccctggtagtccacgccgtaaacgatgagtactagctgtcggaggttacccccttcggtggcgcagctaacgcattaagtactccgcctggggagtacgctcgcaagagtgaaactcaaaggaattgacggggacccgcacaagtagcggagcatgtggtttaattcgaagcaacgcgaagaaccttacctaagcttgacatccttttgaccgatgcctaatcgcatctttcccttcggggacagaagtgacaggtggtgcatggttgtcgtcagctcgtgtcgtgagatgttgggttaagtcccgcaacgagcgcaacccttgcctttagttgccatcattaagttgggcactctagagggactgccagggataacctggaggaaggtggggatgacgtcaaatcatcatgccccttatgcttagggctacacacgtgctacaatgggtggtacagagggcagcgaagtcgtgaggccaagctaatcccttaaagccattctcagttcggattgtaggctgaaactcgcctacatgaagctggagttactagtaatcgcagatcagaatgctgcggtgaatgcgttcccgggtcttgtacacaccgcccgtcacaccatgggagttgggggcgcccgaagccggctagctaaccttttggaagcggtcgtcgaaggtgaaaccaataactggggtgaagtcgtaacaaggtagccgtatcggaaggtgcggctggatcacctccttt

SEQ ID NO: 270 - DNA, 1528 bp, artificial sequence; identical to SEQ ID NO: 41
  >GCF_000154365|IEEMCAGI_02026 16S ribosomal RNA

SEQ ID NO: 271 - DNA, 1426 bp, artificial sequence
  >GCF_000233455|AHPKGLEH_06074 16S ribosomal RNA
  misc_feature (1422)..(1426): n is a, c, g, or t
tttgagagtttgatcctggctcaggatgaacgctggcggcgtgcctaacacatgcaagtcgaacgaagcaatcagaatgaaattttcggatggatttctggttgactgagtggcggacgggtgagtaacgcgtggataacctgcctcacactgggggataacagttagaaatggctgctaataccgcataagcgcacagtaccgcatggtacggtgtgaaaaactccggtggtgtgagatggatccgcgtctgattagttagttggcggggtaacggcccaccaagacagcgatcagtagccgacctgagagggtgaccggccacattgggactgagacacggcccaaactcctacgggaggcagcagtggggaatattgcacaatgggcgaaagcctgatgcagcgacgccgcgtgagtgaagaagtatttcggtatgtaaagctctatcagcagggaagaaaatgacggtacctgactaagaagccccggctaactacgtgccagcagccgcggtaatacgtagggggcaagcgttatccggatttactgggtgtaaagggagcgtagacggcgaagcaagtctgaagtgaaaacccagggctcaaccctgggactgctttggaaactgttttgctagagtgtcggagaggtaagtggaattcctagtgtagcggtgaaatgcgtagatattaggaggaacaccagtggcgaaggcggcttactggacgataactgacgttgaggctcgaaagcgtggggagcaaacaggattagataccctggtagtccacgccgtaaacgatgaatgctaggtgttggggggcaaagcccttcggtgccgtcgcaaacgcaataagcattccacctggggagtacgttcgcaagaatgaaactcaaaggaattgacggggacccgcacaagcggtggagcatgtggtttaattcgaagcaacgcgaagaaccttaccaagtcttgacatccccctgaccggtcagtaaagtgacctttccttcgggacaggggagacaggtggtgcatggttgtcgtcagctcgtgtcgtgagatgttgggttaagtcccgcaacgagcgcaacccttatccttagtagccagcaggtaaagctgggcactctagggagactgccagggataacctggaggaaggtggggatgacgtcaaatcatcatgccccttatgatttgggctacacacgtgctacaatggcgtaaacaaagggaagcgaccctgcgaaggcaagcaaatcccaaaaataacgtcccagttcggactgtagtctgcaacccgactacacgaagctggaatcgctagtaatcgcgaatcagaatgtcgcggtgaatacgttcccgggtcttgtacacaccgcccgtcacaccatgggagtcagcaacgcccgaannnnn

SEQ ID NO: 272 - DNA, 1528 bp, artificial sequence
  >GCF_000371525|EJCIJBLF_04781 16S ribosomal RNA
atgagagtttgatcctggctcaggatgaacgctggcggcgtgcctaacacatgcaagtcgaacgaagcaattaaaggaagttttcggacggaatttgattgactgagtggcggacgggtgagtaacgcgtggataacctgcctcacactgggggataacagttagaaatgactgctaataccgcataagcgcacagtaccgcatggtacggtgtgaaaaactccggtggtgtgagatggatccgcgtctgattagccagttggcggggtaacggcccaccaaagcgacgatcagtagccgacctgagagggtgaccggccacattgggactgagacacggcccaaactcctacgggaggcagcagtggggaatattgcacaatgggcgaaagcctgatgcagcgacgccgcgtgagtgaagaagtatttcggtatgtaaagctctatcagcagggaagaaaatgacggtacctgactaagaagccccggctaactacgtgccagcagccgcggtaatacgtagggggcaagcgttatccggatttactgggtgtaaagggagcgtagacggcgaagcaagtctgaagtgaaaacccagggctcaaccctgggactgctttggaaactgttttgctagagtgtcggagaggtaagtggaattcctagtgtagcggtgaaatgcgtagatattaggaggaacaccagtggcgaaggcggcttactggacgataactgacgttgaggctcgaaagcgtggggagcaaacaggattagataccctggtagtccacgccgtaaacgatgaatgctaggtgttggggggcaaagcccttcggtgccgtcgcaaacgcagtaagcattccacctggggagtacgttcgcaagaatgaaactcaaaggaattgacggggacccgcacaagcggtggagcatgtggtttaattcgaagcaacgcgaagaaccttaccaagtcttgacatccttttgaccggcgtgtaacggcgccttcccttcggggcaagagagacaggtggtgcatggttgtcgtcagctcgtgtcgtgagatgttgggttaagtcccgcaacgagcgcaacccttatccttagtagccagcaggtagagctgggcactctagggagactgccagggataacctggaggaaggcggggatgacgtcaaatcatcatgccccttatgatttgggctacacacgtgctacaatggcgtaaacaaagggaagcaagacagtgatgtggagcaaatcccaaaaataacgtcccagttcggactgtagtctgcaacccgactacacgaagctggaatcgctagtaatcgcgaatcagaatgtcgcggtgaatacgttcccgggtcttgtacacaccgcccgtcacaccatgggagtcagcaacgcccgaagtcagtgacccaactcgcaagagagggagctgccgaaggcggggcaggtaactggggtgaagtcgtaacaaggtagccgtatcggaaggtgcggctggatcacctccttt

SEQ ID NO: 273 - DNA, 1528 bp, artificial sequence
  >GCF_000371525|EJCIJBLF_05555 16S ribosomal RNA
atgagagtttgatcctggctcaggatgaacgctggcggcgtgcctaacacatgcaagtcgaacgaagcaattaaaggaagttttcggatggaatttgattgactgagtggcggacgggtgagtaacgcgtggataacctgcctcacactgggggataacagttagaaatgactgctaataccgcataagcgcacagtgccgcatggtacggtgtgaaaaactccggtggtgtgagatggatccgcgtctgattagccagttggcggggtaacggcccaccaaagcgacgatcagtagccgacctgagagggtgaccggccacattgggactgagacacggcccaaactcctacgggaggcagcagtggggaatattgcacaatgggcgaaagcctgatgcagcgacgccgcgtgagtgaagaagtatttcggtatgtaaagctctatcagcagggaagaaaatgacggtacctgactaagaagccccggctaactacgtgccagcagccgcggtaatacgtagggggcaagcgttatccggatttactgggtgtaaagggagcgtagacggcgaagcaagtctgaagtgaaaacccagggctcaaccctgggactgctttggaaactgttttgctagagtgtcggagaggtaagtggaattcctagtgtagcggtgaaatgcgtagatattaggaggaacaccagtggcgaaggcggcttactggacgataactgacgttgaggctcgaaagcgtggggagcaaacaggattagataccctggtagtccacgccgtaaacgatgaatgctaggtgttggggggcaaagcccttcggtgccgtcgcaaacgcagtaagcattccacctggggagtacgttcgcaagaatgaaactcaaaggaattgacggggacccgcacaagcggtggagcatgtggtttaattcgaagcaacgcgaagaaccttaccaagtcttgacatcctcttgaccggcgtgtaacggcgccttcccttcggggcaagagagacaggtggtgcatggttgtcgtcagctcgtgtcgtgagatgttgggttaagtcccgcaacgagcgcaacccttatccttagtagccagcaggtagagctgggcactctagggagactgccagggataacctggaggaaggtggggatgacgtcaaatcatcatgccccttatgatttgggctacacacgtgctacaatggcgtaaacaaagggaagcaagacagtgatgtggagcaaatcccaaaaataacgtcccagttcggactgtagtctgcaacccgactacacgaagctggaatcgctagtaatcgcgaatcagaatgtcgcggtgaatacgttcccgggtcttgtacacaccgcccgtcacaccatgggagtcagcaacgcccgaagtcagtgacccaactcgcaagagagggagctgccgaaggcggggcaggtaactggggtgaagtcgtaacaaggtagccgtatcggaaggtgcggctggatcacctccttt

SEQ ID NO: 274 - DNA, 1528 bp, artificial sequence
  >GCF_000371525|EJCIJBLF_05682 16S ribosomal RNA
atgagagtttgatcctggctcaggatgaacgctggcggcgtgcctaacacatgcaagtcgaacgaagcaattaaaggaagttttcggatggaatttgattgactgagtggcggacgggtgagtaacgcgtggataacctgcctcacactgggggataacagttagaaatgactgctaataccgcataagcgcacagtaccgcatggtacggtgtgaaaaactccggtggtgtgagatggatccgcgtctgattagccagttggcggggtaacggcccaccaaagcgacgatcagtagccgacctgagagggtgaccggccacattgggactgagacacggcccaaactcctacgggaggcagcagtggggaatattgcacaatgggcgaaagcctgatgcagcgacgccgcgtgagtgaagaagtatttcggtatgtaaagctctatcagcagggaagaaaatgacggtacctgactaagaagccccggctaactacgtgccagcagccgcggtaatacgtagggggcaagcgttatccggatttactgggtgtaaagggagcgtagacggcgaagcaagtctgaagtgaaaacccagggctcaaccctgggactgctttggaaactgttttgctagagtgtcggagaggtaagtggaattcctagtgtagcggtgaaatgcgtagatattaggaggaacaccagtggcgaaggcggcttactggacgataactgacgttgaggctcgaaagcgtggggagcaaacaggattagataccctggtagtccacgccgtaaacgatgaatgctaggtgttggggggcaaagcccttcggtgccgtcgcaaacgcagtaagcattccacctggggagtacgttcgcaagaatgaaactcaaaggaattgacggggacccgcacaagcggtggagcatgtggtttaattcgaagcaacgcgaagaaccttaccaagtcttgacatcctcttggccggcgtgtaacggcgccttcccttcggggcaagagagacaggtggtgcatggttgtcgtcagctcgtgtcgtgagatgttgggttaagtcccgcaacgagcgcaacccttatccttagtagccagcaggtagagctgggcactctagggagactgccagggataacctggaggaaggtggggatgacgtcaaatcatcatgccccttatgatttgggctacacacgtgctacaatggcgtaaacaaagggaagcaagacagtgatgtggagcaaatcccaaaaataacgtcccagttcggactgtagtctgcaacccgactacacgaagctggaatcgctagtaatcgcgaatcagaatgtcgcggtgaatacgttcccgggtcttgtacacaccgcccgtcacaccatgggagtcagcaacgcccgaagtcagtgacccaactcgcaagagagggagctgccgaaggcggggcaggtaactggggtgaagtcgtaacaaggtagccgtatcggaaggtgcggctggatcacctccttt

SEQ ID NO: 275 - DNA, 1513 bp, artificial sequence
  >GCA_900066955|MEIAGFLD_00763 16S ribosomal RNA
agtgagagtttgatcctggctcaggacgaacgctggcggcgtgcctaacacatgcaagtcgagcgagtgaatctccttcgggagtgaagctagcggcggacgggtgagtaacacgtgggcaacctgcctcatagaggggaatagccttccgaaaggaagattaataccgcataagattgtagcttcgcatgaagtagcaattaaaggagcaatccgctatgagatgggcccgcggcgcattagctagttggtgaggtaacggctcaccaaggcgacgatgcgtagccgacctgagagggtgatcggccacattgggactgagacacggcccagactcctacgggaggcagcagtggggaatattgcacaatgggggaaaccctgatgcagcaacgccgcgtgagtgatgacggccttcgggttgtaaagctctgtcttcagggacgataatgacggtacctgaggaggaagccacggctaactacgtgccagcagccgcggtaatacgtaggtggcgagcgttgtccggatttactgggcgtaaagggagcgtaggcggacttttaagtgagatgtgaaatacccgggctcaacttgggtgctgcatttcaaactggaagtctagagtgcaggagaggagaatggaattcctagtgtagcggtgaaatgcgtagagattaggaagaacaccagtggcgaaggcgattctctggactgtaactgacgctgaggctcgaaagcgtggggagcaaacaggattagataccctggtagtccacgccgtaaacgatgaatactaggtgtaggggttgtcatgacctctgtgccgccgctaacgcattaagtattccgcctggggagtacggtcgcaagattaaaactcaaaggaattgacgggggcccgcacaagcagcggagcatgtggtttaattcgaagcaacgcgaagaaccttacctagacttgacatctcctgcattacccttaatcggggaagttccttcgggaacaggaagacaggtggtgcatggttgtcgtcagctcgtgtcgtgagatgttgggttaagtcccgcaacgagcgcaacccttattgttagttgctaccatttagttgagcactctagcgagactgcccgggttaaccgggaggaaggtggggatgacgtcaaatcatcatgccccttatgtctagggctacacacgtgctacaatggcaagtacaaagagaagcaagaccgcgaggtggagcaaaactcaaaaacttgtctcagttcggattgtaggctgaaactcgcctacatgaagctggagttgctagtaatcgcgaatcagcatgtcgcggtgaatacgttcccgggccttgtacacaccgcccgtcacaccatgagagttggcaatacccaaagtgcgtgatctgactcgcaagagaggaagcgccctaaggtagggtcagcgattggggtgaagtcgtaacaaggtagccgtaggagaacctgcggctggatcacctccttt

SEQ ID NO: 276 - DNA, 1528 bp, artificial sequence; identical to SEQ ID NO: 42
  >GCF_000371445|MHGGNMMN_02421 16S ribosomal RNA

SEQ ID NO: 277 - DNA, 927 bp, artificial sequence; identical to SEQ ID NO: 43
  >GCF_000371445|MHGGNMMN_05914 16S ribosomal RNA (partial)

SEQ ID NO: 278 - DNA, 1537 bp, artificial sequence
  >GCF_000371425|KOJCOHFI_01470 16S ribosomal RNA
atggagagtttgatcctggctcaggatgaacgctggcggcatgcctaatacatgcaagtcgaacgaagactctaggaagcttgcttccaaagagacttagtggcgaacgggtgagtaacacgtaggtaacctgcccatgtgtccgggataactgctggaaacggtagctaaaaccggataggtatacagagcgcatgctcagtatattaaagcgcccatcaaggcgtgaacatggatggacctgcggcgcattagctagttggtgaggtaacggcccaccaaggcgatgatgcgtagccggcctgagagggtaaacggccacattgggactgagacacggcccaaactcctacgggaggcagcagtagggaattttcgtcaatgggggaaaccctgaacgagcaatgccgcgtgagtgaagaaggtcttcggatcgtaaagctctgttgtaagtgaagaacggctcatagaggaaatgctatgggagtgacggtagcttaccagaaagccacggctaactacgtgccagcagccgcggtaatacgtaggtggcaagcgttatccggaatcattgggcgtaaagggtgcgtaggtggcgtactaagtctgtagtaaaaggcaatggctcaaccattgtaagctatggaaactggtatgctggagtgcagaagagggcgatggaattccatgtgtagcggtaaaatgcgtagatatatggaggaacaccagtggcgaaggcggtcgcctggtctgtaactgacactgaggcacgaaagcgtggggagcaaataggattagataccctagtagtccacgccgtaaacgatgagaactaagtgttggaggaattcagtgctgcagttaacgcaataagttctccgcctggggagtatgcacgcaagtgtgaaactcaaaggaattgacgggggcccgcacaagcggtggagtatgtggtttaattcgaagcaacgcgaagaaccttaccaggccttgacatggaaacaaataccctagagatagggggataattatggatcacacaggtggtgcatggttgtcgtcagctcgtgtcgtgagatgttgggttaagtcccgcaacgagcgcaacccttgtcgcatgttaccagcatcaagttggggactcatgcgagactgccggtgacaaaccggaggaaggtggggatgacgtcaaatcatcatgccccttatggcctgggctacacacgtactacaatggcgaccacaaagagcagcgacttggtgacaagaagcgaatctcataaaggtcgtctcagttcggattgaagtctgcaactcgacttcatgaagtcggaatcgctagtaatcgcagatcagcatgctgcggtgaatacgttctcgggccttgtacacaccgcccgtcaaaccatgggagtcagtaatacccgaagccggtggcataaccgtaaggagtgagccgtcgaaggtaggaccgatgactggggttaagtcgtaacaaggtatccctacgggaacgtggggatggatcacctccttt

SEQ ID NO: 279 - DNA, 1537 bp, artificial sequence
  >GCF_000371425|KOJCOHFI_01712 16S ribosomal RNA
atggagagtttgatcctggctcaggatgaacgctggcggcatgcctaatacatgcaagtcgaacgaagtcttcaggaagcttgcttccaaaaagacttagtggcgaacgggtgagtaacacgtaggtaacctgcccatgtgtccgggataactgctggaaacggtagctaaaaccggataggtatacggagcgcatgctctgtatattaaagcgcccatcaaggcgtgaacatggatggacctgcggcgcattagctagttggtgaggtaacggcccaccaaggcgatgatgcgtagccggcctgagagggtaaacggccacattgggactgagacacggcccaaactcctacgggaggcagcagtagggaattttcgtcaatgggggaaaccctgaacgagcaatgccgcgtgagtgaagaaggtcttcggatcgtaaagctctgttgtaagtgaagaacggctcatagaggaaatgctatgggagtgacggtagcttaccagaaagccacggctaactacgtgccagcagccgcggtaatacgtaggtggcaagcgttatccggaatcattgggcgtaaagggtgcgtaggtggcgtactaagtctgtagtaaaaggcaatggctcaaccattgtaagctatggaaactggtatgctggagtgcagaagagggcgatggaattccatgtgtagcggtaaaatgcgtagatatatggaggaacaccagtggcgaaggcggtcgcctggtctgtaactgacactgaggcacgaaagcgtggggagcaaataggattagataccctagtagtccacgccgtaaacgatgagaactaagtgttggaggaattcagtgctgcagttaacgcaataagttctccgcctggggagtatgcacgcaagtgtgaaactcaaaggaattgacgggggcccgcacaagcggtggagtatgtggtttaattcgaagcaacgcgaagaaccttaccaggccttgacatggaaacaaataccctagagatagggggataattatggatcacacaggtggtgcatggttgtcgtcagctcgtgtcgtgagatgttgggttaagtcccgcaacgagcgcaacccttgtcgcatgttaccagcatcaagttggggactcatgcgagactgccggtgacaaaccggaggaaggtggggatgacgtcaaatcatcatgccccttatggcctgggctacacacgtactacaatggcgaccacaaagagcagcgacttggtgacaagaagcgaatctcataaaggtcgtctcagttcggattgaagtctgcaactcgacttcatgaagtcggaatcgctagtaatcgcagatcagcatgctgcggtgaatacgttctcgggccttgtacacaccgcccgtcaaaccatgggagtcagtaatacccgaagccggtggcataaccgtaaggagtgagccgtcgaaggtaggaccgatgactggggttaagtcgtaacaaggtatccctacgggaacgtggggatggatcacctccttt

SEQ ID NO: 280 - DNA, 1537 bp, artificial sequence
  >GCF_000371425|KOJCOHFI_01712 16S ribosomal RNA
atggagagtttgatcctggctcaggatgaacgctggcggcatgcctaatacatgcaagtcgaacgaagtcttcaggaagcttgcttccaaaaagacttagtggcgaacgggtgagtaacacgtaggtaacctgcccatgtgtccgggataactgctggaaacggtagctaaaaccggataggtatacggagcgcatgctctgtatattaaagcgcccttcaaggcgtgaacatggatggacctgcgacgcattagctagttggtgaggtaacggcccaccaaggcgatgatgcgtagccggcctgagagggtaaacggccacattgggactgagacacggcccaaactcctacgggaggcagcagtagggaattttcgtcaatgggggaaaccctgaacgagcaatgccgcgtgagtgaagaaggtcttcggatcgtaaagctctgttgtaagtgaagaacggctcatagaggaaatgctatgggagtgacggtagcttaccagaaagccacggctaactacgtgccagcagccgcggtaatacgtaggtggcaagcgttatccggaatcattgggcgtaaagggtgcgtaggtggcgtactaagtctgtagtaaaaggcaatggctcaaccattgtaagctatggaaactggtatgctggagtgcagaagagggcgatggaattccatgtgtagcggtaaaatgcgtagatatatggaggaacaccagtggcgaaggcggtcgcctggtctgtaactgacactgaggcacgaaagcgtggggagcaaataggattagataccctagtagtccacgccgtaaacgatgagaactaagtgttggagaaattcagtgctgcagttaacgcaataagttctccgcctggggagtatgcacgcaagtgtgaaactcaaaggaattgacgggggcccgcacaagcggtggagtatgtggtttaattcgaagcaacgcgaagaaccttaccaggccttgacatggaaacaaataccctagagatagggggataattatggatcacacaggtggtgcatggttgtcgtcagctcgtgtcgtgagatgttgggttaagtcccgcaacgagcgcaacccttgtcgcatgttaccagcatcaagttggggactcatgcgagactgccggtgacaaaccggaggaaggtggggatgacgtcaaatcatcatgccccttatggcctgggctacacacgtactacaatggcgaccacaaagagcagcgacttggtgacaagaagcgaatctcataaaggtcgtctcagttcggattgaagtctgcaactcgacttcatgaagtcggaatcgctagtaatcgcagatcagcatgctgcggtgaatacgttctcgggccttgtacacaccgcccgtcaaaccatgggagtcagtaatacccgaagccggtggcataaccgtaaggagtgagccgtcgaaggtaggaccgatgactggggttaagtcgtaacaaggtatccctacgggaacgtggggatggatcacctccttt

SEQ ID NO: 281 - DNA, 1537 bp, artificial sequence
  >GCF_000371425|KOJCOHFI_03996 16S ribosomal RNA
atggagagtttgatcctggctcaggatgaacgctggcggcatgcctaatacatgcaagtcgaacgaagtcttcaggaagcttgcttccaaaaagacttagtggcgaacgggtgagtaacacgtaggtaacctgcccatgtgtccgggataactgctggaaacggtagctaaaaccggataggtatacggagcgcatgctcagtatattaaagcgcccatcaaggcgtgaacatggatggacctgcggcgcattagctagttggtgaggtaacggcccaccaaggcgatgatgcgtagccggcctgagagggtaaacggccacattgggactgagacacggcccaaactcctacgggaggcagcagtagggaattttcgtcaatgggggaaaccctgaacgagcaatgccgcgtgagtgaagaaggtcttcggatcgtaaagctctgttgtaagtgaagaacggctcatagaggaaatgctatgggagtgacggtagcttaccagaaagccacggctaactacgtgccagcagccgcggtaatacgtaggtggcaagcgttatccggaatcattgggcgtaaagggtgcgtaggtggcgtactaagtctgtagtaaaaggcaatggctcaaccattgtaagctatggaaactggtatgctggagtgcagaagagggcgatggaattccatgtgtagcggtaaaatgcgtagatatatggaggaacaccagtggcgaaggcggtcgcctggtctgtaactgacactgaggcacgaaagcgtggggagcaaataggattagataccctagtagtccacgccgtaaacgatgagaactaagtgttggaggaattcagtgctgcagttaacgcaataagttctccgcctggggagtatgcacgcaagtgtgaaactcaaaggaattgacgggggcccgcacaagcggtggagtatgtggtttaattcgaagcaacgcgaagaaccttaccaggccttgacatggaaacaaataccctagagatagggggataattatggatcacacaggtggtgcatggttgtcgtcagctcgtgtcgtgagatgttgggttaagtcccgcaacgagcgcaacccttgtcgcatgttaccagcatcaagttggggactcatgcgagactgccggtgacaaaccggaggaaggtggggatgacgtcaaatcatcatgccccttatggcctgggctacacacgtactacaatggcgaccacaaagagcagcgacttggtgacaagaagcgaatctcataaaggtcgtctcagttcggattgaagtctgcaactcgacttcatgaagtcggaatcgctagtaatcgcagatcagcatgctgcggtgaatacgttctcgggccttgtacacaccgcccgtcaaaccatgggagtcagtaatacccgaagccggtggcataaccgtaaggagtgagccgtcgaaggtaggaccgatgactggggttaagtcgtaacaaggtatccctacgggaacgtggggatggatcacctccttt

SEQ ID NO: 282 - DNA, 1537 bp, artificial sequence
  >GCF_000371425|KOJCOHFI_04550 16S ribosomal RNA
atggagagtttgatcctggctcaggatgaacgctggcggcatgcctaatacatgcaagtcgaacgaagtctttaggaagcttgcttccaaaaagacttagtggcgaacgggtgagtaacacgtaggtaacctgcccatgtgtccgggataactgctggaaacggtagctaaaaccggataggtatacggagcgcatgctctgtatattaaagcgcccatcaaggcgtgaacatggatggacctgcggcgcattagctagttggtgaggtaacggcccaccaaggcgatgatgcgtagccggcctgagagggtaaacggccacattgggactgagacacggcccaaactcctacgggaggcagcagtagggaattttcgtcaatgggggaaaccctgaacgagcaatgccgcgtgagtgaagaaggtcttcggatcgtaaagctctgttgtaagtgaagaacggctcatagaggaaatgctatgggagtgacggtagcttaccagaaagccacggctaactacgtgccagcagccgcggtaatacgtaggtggcaagcgttatccggaatcattgggcgtaaagggtgcgtaggtggcgtactaagtctgtagtaaaaggcaatggctcaaccattgtaagctatggaaactggtatgctggagtgcagaagagggcgatggaattccatgtgtagcggtaaaatgcgtagatatatggaggaacaccagtggcgaaggcggtcgcctggtctgtaactgacactgaggcacgaaagcgtggggagcaaataggattagataccctagtagtccacgccgtaaacgatgagaactaagtgttggaggaattcagtgctgcagttaacgcaataagttctccgcctggggagtatgcacgcaagtgtgaaactcaaaggaattgacgggggcccgcacaagcggtggagtatgtggtttaattcgaagcaacgcgaagaaccttaccaggccttgacatggaaacaaataccctagagatagggggataattatggatcacacaggtggtgcatggttgtcgtcagctcgtgtcgtgagatgttgggttaagtcccgcaacgagcgcaacccttgtcgcatgttaccagcatcaagttggggactcatgcgagactgccggtgacaaaccggaggaaggtggggatgacgtcaaatcatcatgccccttatggcctgggctacacacgtactacaatggcgaccacaaagagcagcgacttggtgacaagaagcgaatctcataaaggtcgtctcagttcggattgaagtctgcaactcgacttcatgaagtcggaatcgctagtaatcgcagatcagcatgctgcggtgaatacgttctcgggccttgtacacaccgcccgtcaaaccatgggagtcagtaatacccgaagccggtggcataaccgtaaggagtgagccgtcgaaggtaggaccgatgactggggttaagtcgtaacaaggtatccctacgggaacgtggggatggatcacctccttt

SEQ ID NO: 283 - DNA, 1529 bp, artificial sequence
  >SPC11488|PLFPGPHM_01842 16S ribosomal RNA
tttgagagtttgatcctggctcaggatgaacgctggcggcgtgcctaacacatgcaagtcgaacgaagcatttcagatgaagttttcggatggattctgagatgactgagtggcggacgggtgagtaacacgtggataacctgcctcacactgggggacaacagttagaaatgactgctaataccgcataagcgcacagtaccgcatggtacagtgtgaaaaactccggtggtgtgagatggatccgcgtctgattagccagttggcggggtaacggcccaccaaagcgacgatcagtagccgacctgagagggtgaccggccacattgggactgagacacggcccaaactcctacgggaggcagcagtggggaatattgcacaatgggcgaaagcctgatgcagcgacgccgcgtgagtgaagaagtatttcggtatgtaaagctctatcagcagggaagataatgacggtacctgactaagaagccccggctaactacgtgccagcagccgcggtaatacgtagggggcaagcgttatccggatttactgggtgtaaagggagcgtagacggcatggcaagtctgaagtgaaaacccagggctcaaccctgggactgctttggaaactgtcaagctagagtgcaggagaggtaagtggaattcctagtgtagcggtgaaatgcgtagatattaggaggaacaccagtggcgaaggcggcttactggactgtaactgacgttgaggctcgaaagcgtggggagcaaacaggattagataccctggtagtccacgccgtaaacgatgagtgctaggtgttggggggcaaagcccttcggtgccgtcgcaaacgcaataagcactccacctggggagtacgttcgcaagaatgaaactcaaaggaattgacggggacccgcacaagcggtggagcatgtggtttaattcgaagcaacgcgaagaaccttaccaagtcttgacatcctcttgaccggcgtgtaacggcgcctttccttcgggacaagggagacaggtggtgcatggttgtcgtcagctcgtgtcgtgagatgttgggttaagtcccgcaacgagcgcaacccttatccttagtagccagcattaagatgggcactctagggagactgccagggacaacctggaggaaggtggggatgacgtcaaatcatcatgccccttatgatttgggctacacacgtgctacaatggcgtaaacaaagggaagcgaccctgcgaaggtgagcaaatctcaaaaataacgtcccagttcggactgtagtctgcaacccgactacacgaagctggaatcgctagtaatcgcgaatcagaatgtcgcggtgaatacgttcccgggtcttgtacacaccgcccgtcacaccatgggagtcagcaacgcccgaagtcagtgacccaactcgcaagagagggagctgccgaaggcggggcaggtaactggggtgaagtcgtaacaaggtagccgtatcggaaggtgcggctggatcacctccttt

SEQ ID NO: 284 - DNA, 1548 bp, artificial sequence; identical to SEQ ID NO: 44
  >GCF_000154345|EBFLKIBH_01280 16S ribosomal RNA

SEQ ID NO: 285 - DNA, 1548 bp, artificial sequence; identical to SEQ ID NO: 44
  >GCF_000154345|EBFLKIBH_02083 16S ribosomal RNA

SEQ ID NO: 286 - DNA, 1513 bp, artificial sequence; identical to SEQ ID NO: 185
  >GCA_001404795|NBBKEIAN_00682 16S ribosomal RNA

SEQ ID NO: 287 - DNA, 1510 bp, artificial sequence
  >GCF_000255475|KGFGDIJJ_03202 16S ribosomal RNA
attgagagtttgatcctggctcaggatgaacgctggcggcgtgcttaacacatgcaagtcgagcgatgaagtttccttcgggaaacggattagcggcggacgggtgagtaacacgtgggtaacctgcctcatagagtggaatagccttccgaaaggaagattaataccgcataatgttgaaagatggcatcatcattcaaccaaaggagcaatccgctatgagatggacccgcggcgcattagctagttggtggggtaacggcctaccaaggcgacgatgcgtagccgacctgagagggtgatcggccacattgggactgagacacggcccagactcctacgggaggcagcagtggggaatattgcacaatgggggaaaccctgatgcagcaacgccgcgtgagtgatgaaggttttcggatcgtaaagctctgtctttggggaagataatgacggtacccaaggaggaagccacggctaactacgtgccagcagccgcggtaatacgtaggtggcgagcgttatccggatttactgggcgtaaagggagcgtaggcggatgattaagtgggatgtgaaatacccgggctcaacttgggtgctgcattccaaactggttatctagagtgcaggagaggagagtggaattcctagtgtagcggtgaaatgcgtagagattaggaagaacaccagtggcgaaggcgactctctggactgtaactgacgctgaggctcgaaagcgtggggagcaaacaggattagataccctggtagtccacgccgtaaacgatgaatactaggtgtgggggtttcaacacctccgtgccgccgctaacgcattaagtattccgcctggggagtacggtcgcaagattaaaactcaaaggaattgacggggacccgcacaagtagcggagcatgtggtttaattcgaagcaacgcgaagaaccttacctacacttgacatcccttgcattactcttaatcgaggaaatcccttcggggacaaggtgacaggtggtgcatggttgtcgtcagctcgtgtcgtgagatgttgggttaagtcccgcaacgagcgcaacccttgtcgttagttactaccattaagttgaggactctagcgagactgcctgggttaaccaggaggaaggtggggatgacgtcaaatcatcatgccccttatgtgtagggctacacacgtgctacaatggctggtacagagagatgcaataccgcgaggtggagccaaacttaaaaaccagtctcagttcggattgtaggctgaaactcgcctacatgaagctggagttactagtaatcgcgaatcagaatgtcgcggtgaatacgttcccgggtcttgtacacaccgcccgtcacaccatgagagttggcaatacccgaagtccgtgagctaaccgcaaggaggcagcggccgaaggtagggtcagcgattggggtgaagtcgtaacaaggtagccgtaggagaacctgcggctggatcacctccttt

SEQ ID NO: 288 - DNA, 1524 bp, artificial sequence; identical to SEQ ID NO: 46
  >GCF_000154485|DBDELJNL_00399 16S ribosomal RNA

SEQ ID NO: 289 - DNA, 1420 bp, artificial sequence; identical to SEQ ID NO: 50
  >SPC10801|PLHJGIDB_03707 16S ribosomal RNA

SEQ ID NO: 290 - DNA, 1497 bp, artificial sequence
  >SPC11486|contig000066_69_1565
agagtttgatcctggctcaggacgaacgctggcggcgtgcctaacacatgcaagtcgagcgatgaagcccttcggggtggattagcggcggacgggtgagtaacacgtgggtaacctgccttgtagagggggatagccttccgaaaggaagattaataccgcataacatctttttatcgcatggtagaaagatcaaaggagcaatccgctacaagatggacccgcggcgcattagctagttggtgaggtaacggctcaccaaggcgacgatgcgtagccgacctgagagggtgatcggccacattggaactgagacacggtccagactcctacgggaggcagcagtggggaatattgcgcaatgggggaaaccctgacgcagcaacgccgcgtgaatgaagaaggccttagggttgtaaagttctgtttacggggacgataatgacggtacccgtggaggaagccacggctaactacgtgccagcagccgcggtaatacgtaggtggcaagcgttgtccggatttactgggcgtaaaggatgcgtaggcggatgtttaagtgagatgtgaaatacccgggctcaacttgggtgctgcatttcaaactggacatctagagtgcgggagaggaaagcggaattcctagtgtagcggtgaaatgcgtagagattaggaagaacaccagtggcgaaggcggctttctggaccgtaactgacgctgaggcatgaaagcgtggggagcaaacaggattagataccctggtagtccacgccgtaaacgatgaatactaggtgtaggaggtatcgactccttctgtgccgcagttaacacaataagtattccgcctgggaagtacgatcgcaagattaaaactcaaaggaattgacgggggcccgcacaagcagcggagcatgtggtttaattcgaagcaacgcgaagaaccttacctagacttgacatctcctgaattactcttaatcgaggaagcccttcggggcaggaagacaggtggtgcatggttgtcgtcagctcgtgtcgtgagatgttgggttaagtcccgcaacgagcgcaacccttatcattagttgctaccattaagttgagcactctagtgagactgccacggttaacgtggaggaaggtggggatgacgtcaaatcatcatgccccttatgtctagggctacacacgtgctacaatggtgaatacaaatagatgcaataccgcgaggtggagccaaactataaaattcatcccagttcggattgcagtctgaaactcgactgcatgaagccggagttgctagtaatcgcgaatcagcatgtcgcggtgaatacgttcccgggccttgtacacaccgcccgtcacaccatgagagctggtaacacccgaagtccgtgaggtaaccgcaaggagccagcggccgaaggtgggattagtgattggggtgaagtcgtaacaaggtagccgtaggagaacctgcggctggatcacct

SEQ ID NO: 291 - DNA, 1527 bp, artificial sequence; identical to SEQ ID NO: 51
  >GCF_000466485|MLALJMBA_01519 16S ribosomal RNA

SEQ ID NO: 292 - DNA, 976 bp, artificial sequence
  >GCF_000210555|DBPIKDPN_00450 16S ribosomal RNA (partial)
  misc_feature (974)..(976): n is a, c, g, or t
atgagagtttgatcctggctcaggatgaacgctggcggcgtgcttaacacatgcaagtcgaacggacgatgaagagcttgcttttcaaagttagtggcggacgggtgagtaacgcgtgggtaacctgcctcatacagggggatagcagctggaaacggctgataaaaccgcataagcgcacagcatcgcatgatgcagtgtgaaaaactccggtggtatgagatggacccgcgtctgattagctggttggtgaggtaacggcccaccaaggcgacgatcagtagccggcctgagagggtgaccggccacattgggactgagacacggcccaaactcctacgggaggcagcagtggggaatattgcacaatgggggaaaccctgatgcagcgacgccgcgtgaaggaagaagtatctcggtatgtaaacttctatcagcagggaagataatgacggtacctgactaagaagccccggctaactacgtgccagcagccgcggtaatacgtagggggcaagcgttatccggatttactgggtgtaaagggagcgtaggcggcggagcaagtcagaagtgaaagcccggggctcaaccccgggacggcttttgaaactgccctgcttgatttcaggagaggtaagcggaattcctagtgtagcggtgaaatgcgtagatattaggaggaacaccagtggcgaaggcggcttactggactgacaatgacgctgaggctcgaaagcgtggggagcaaacaggattagataccctggtagtccacgccgtaaacgatgaatactaggtgtcgggggctcataagagctttcggtgccgcagcaaacgcaataagtattccacctggggagtacgttcgcaagaatgaaactcaaaggaattgacggggacccgcacaagcggtggagcatgtggtttaattcgaagcaacgcgaagaaccttaccaggccttgacatcccnnn

SEQ ID NO: 293 - DNA, 1528 bp, artificial sequence
  >GCF_000210555|DBPIKDPN_00450 16S ribosomal RNA (partial)
aacgagagtttgatcctggctcaggatgaacgctggcggcgtgcttaacacatgcaagtcgaacgaagcactttaacctgattcttcggatgaaggtttttgtgactgagtggcggacgggtgagtaacgcgtgggtaacctgcctcatacagggggataacagttagaaatgactgctaataccgcataagaccacagagccgcatggctcggtgggaaaaactccggtggtatgagatggacccgcgtctgattaggtagttggtggggtaacggcctaccaagccaacgatcagtagccgacctgagagggtgaccggccacattgggactgagacacggcccaaactcctacgggaggcagcagtggggaatattgcacaatgggggaaaccctgatgcagcgacgccgcgtgagcgaagaagtatttcggtatgtaaagctctatcagcagggaagaaaatgacggtacctgactaagaagcaccggctaaatacgtgccagcagccgcggtaatacgtatggtgcaagcgttatccggatttactgggtgtaaagggagcgtagacggctgtgtaagtctgaagtgaaagcccggggctcaaccccgggactgctttggaaactatgcagctagagtgtcggagaggtaagtggaattcccagtgtagcggtgaaatgcgtagatattgggaggaacaccagtggcgaaggcggcttactggacgatgactgacgttgaggctcgaaagcgtggggagcaaacaggattagataccctggtagtccacgccgtaaacgatgactactaggtgtcggggagcaaagctcttcggtgccgcagcaaacgcaataagtagtccacctggggagtacgttcgcaagaatgaaactcaaaggaattgacggggacccgcacaagcggtggagcatgtggtttaattcgaagcaacgcgaagaaccttacctgctcttgacatcccggtgaccggcgtgtaatgacgccttttcttcggaacaccggtgacaggtggtgcatggttgtcgtcagctcgtgtcgtgagatgttgggttaagtcccgcaacgagcgcaacccttatcttcagtagccagcaattcggatgggcactctggagagactgccagggataacctggaggaaggtggggatgacgtcaaatcatcatgccccttatgagcagggctacacacgtgctacaatggcgtaaacaaagggaagcgagcctgcgagggtaagcaaatctcaaaaataacgtctcagttcggattgtagtctgcaactcgactacatgaagctggaatcgctagtaatcgcgaatcagcatgtcgcggtgaatacgttcccgggtcttgtacacaccgcccgtcacaccatgggagttggtaacgcccgaagtcagtgacccaaccgtaaggagggagctgccgaaggtgggaccgataactggggtgaagtcgtaacaaggtagccgtatcggaaggtgcggctggatcacctccttt

SEQ ID NO: 294 - DNA, 1527 bp, artificial sequence
  >GCF_000169235|JBAGCDPO_00185 16S ribosomal RNA
acgagagtttgatcctggctcaggatgaacgctggcggcgtgcttaacacatgcaagtcgagcgaagcacataagttcgattcttcggatgaagacttttgtgactgagcggcggacgggtgagtaacgcgtgggtaacctgcctcatacagggggataacagctagaaatggctgctaataccgcataagaccacagtactgcatggtacagtggtaaaaactccggtggtatgagatggacccgcgtctgattaggtagttggtgaggtaacggcccaccaagccgacgatcagtagccgacctgagagggtgaccggccacattgggactgagacacggcccagactcctacgggaggcagcagtggggaatattgcacaatgggcgaaagcctgatgcagcgacgccgcgtgaaggatgaagtatttcggtatgtaaacttctatcagcagggaagaaaatgacggtacctgactaagaagccccggctaactacgtgccagcagccgcggtaatacgtagggggcaagcgttatccggatttactgggtgtaaagggagcgtagacggctgtgcaagtctgaagtgaaaggcatgggctcaacctgtggactgctttggaaactgtgcagctagagtgtcggagaggtaagtggaattcctagtgtagcggtgaaatgcgtagatattaggaggaacaccagtggcgaaggcggcttactggacgatgactgacgttgaggctcgaaagcgtggggagcaaacaggattagataccctggtagtccacgccgtaaacgatgactgctaggtgtcgggtagcaaagctattcggtgccgcagctaacgcaataagcagtccacctggggagtacgttcgcaagaatgaaactcaaaggaattgacggggacccgcacaagcggtggagcatgtggtttaattcgaagcaacgcgaagaaccttacctgatcttgacatcccgatgaccgcttcgtaatggaagtttttcttcggaacatcggtgacaggtggtgcatggttgtcgtcagctcgtgtcgtgagatgttgggttaagtcccgcaacgagcgcaacccttatcttcagtagccagcattaaggatgggcactctggagagactgccagggataacctggaggaaggtggggatgacgtcaaatcatcatgccccttatgaccagggctacacacgtgctacaatggcgtaaacaaagggaggcagagccgcgaggccgagcaaatctcaaaaataacgtctcagttcggattgtagtctgcaactcgactacatgaagctggaatcgctagtaatcgcagatcagaatgctgcggtgaatacgttcccgggtcttgtacacaccgcccgtcacaccatgggagtcagtaacgcccgaagtcagtgacccaaccgaaaggagggagctgccgaaggtgggaccgataactggggtgaagtcgtaacaaggtagccgtatcggaaggtgcggctggatcacctccttt

SEQ ID NO: 295 - DNA, 1527 bp, artificial sequence
  >GCF_000169235|JBAGCDPO_00583 16S ribosomal RNA
acgagagtttgatcctggctcaggatgaacgctggcggcgtgcttaacacatgcaagtcgagcgaagcacttaagtttgattcttcggatgaagacttttgtgactgagcggcggacgggtgagtaacgcgtgggtaacctgcctcatacagggggataacagttagaaatggctgctaataccgcataagaccacagtactgcatggtacagtggtaaaaactccggtggtatgagatggacccgcgtctgattaggtagttggtgaggtaacggcccaccaagccgacgatcagtagccgacctgagagggtgaccggccacattgggactgagacacggcccagactcctacgggaggcagcagtggggaatattgcacaatgggcgaaagcctgatgcagcgacgccgcgtgaaggatgaagtatttcggtatgtaaacttctatcagcagggaagaaaatgacggtacctgactaagaagccccggctaactacgtgccagcagccgcggtaatacgtagggggcaagcgttatccggatttactgggtgtaaagggagcgtagacggctgtgcaagtctgaagtgaaaggcatgggctcaacctgtggactgctttggaaactgtgcagctagagtgtcggagaggtaagtggaattcctagtgtagcggtgaaatgcgtagatattaggaggaacaccagtggcgaaggcggcttactggacgatgactgacgttgaggctcgaaagcgtggggagcaaacaggattagataccctggtagtccacgccgtaaacgatgactgctaggtgtcgggtagcaaagctattcggtgccgcagctaacgcaataagcagtccacctggggagtacgttcgcaagaatgaaactcaaaggaattgacggggacccgcacaagcggtggagcatgtggtttaattcgaagcaacgcgaagaaccttacctgatcttgacatcccgatgaccgcttcgtaatggaagcttttcttcggaacatcggtgacaggtggtgcatggttgtcgtcagctcgtgtcgtgagatgttgggttaagtcccgcaacgagcgcaacccttatcttcagtagccagcattaaggatgggcactctggagagactgccagggataacctggaggaaggtggggatgacgtcaaatcatcatgccccttatgaccagggctacacacgtgctacaatggcgtaaacaaagggaagcagagccgcgaggccgagcaaatctcaaaaataacgtctcagttcggattgtagtctgcaactcgactacatgaagctggaatcgctagtaatcgcagatcagaatgctgcggtgaatacgttcccgggtcttgtacacaccgcccgtcacaccatgggagtcagtaacgcccgaagtcagtgacccaaccgaaaggagggagctgccgaaggtgggaccgataactggggtgaagtcgtaacaaggtagccgtatcggaaggtgcggctggatcacctccttt

SEQ ID NO: 296 - DNA, 1527 bp, artificial sequence
  >GCF_000169235|JBAGCDPO_00880 16S ribosomal RNA
acgagagtttgatcctggctcaggatgaacgctggcggcgtgcttaacacatgcaagtcgagcgaagcacttaagtttgattcttcggatgaagacttttgtgactgagcggcggacgggtgagtaacgcgtgggtaacctgcctcatacagggggataacagttagaaatggctgctaataccgcataagaccacagtactgcatggtacagtggtaaaaactccggtggtatgagatggacccgcgtctgattaggtagttggtgaggtaacggcccaccaagccgacgatcagtagccgacctgagagggtgaccggccacattgggactgagacacggcccagactcctacgggaggcagcagtggggaatattgcacaatgggcgaaagcctgatgcagcgacgccgcgtgaaggatgaagtatttcggtatgtaaacttctatcagcagggaagaaaatgacggtacctgactaagaagccccggctaactacgtgccagcagccgcggtaatacgtagggggcaagcgttatccggatttactgggtgtaaagggagcgtagacggctgtgcaagtctgaagtgaaaggcatgggctcaacctgtggactgctttggaaactgtgcagctagagtgtcggagaggtaagtggaattcctagtgtagcggtgaaatgcgtagatattaggaggaacaccagtggcgaaggcggcttactggacgatgactgacgttgaggctcgaaagcgtggggagcaaacaggattagataccctggtagtccacgccgtaaacgatgactgctaggtgtcgggtagcaaagctattcggtgccgcagctaacgcaataagcagtccacctggggagtacgttcgcaagaatgaaactcaaaggaattgacggggacccgcacaagcggtggagcatgtggtttaattcgaagcaacgcgaagaaccttacctgatcttgacatcccgatgaccgcttcgtaatggaagtttttcttcggaacatcggtgacaggtggtgcatggttgtcgtcagctcgtgtcgtgagatgttgggttaagtcccgcaacgagcgcaacccttatattcagtagccagcatttaggatgggcactctggagagactgccagggataacctggaggaaggtggggatgacgtcaaatcatcatgccccttatgaccagggctacacacgtgctacaatggcgtaaacaaagggaggcagagccgcgaggccgagcaaatctcaaaaataacgtctcagttcggattgtagtctgcaactcgactacatgaagctggaatcgctagtaatcgcagatcagaatgctgcggtgaatacgttcccgggtcttgtacacaccgcccgtcacaccatgggagtcagtaacgcccgaagtcagtgacccaaccgaaaggagggagctgccgaaggtgggaccgataactggggtgaagtcgtaacaaggtagccgtatcggaaggtgcggctggatcacctccttt

SEQ ID NO: 297 - DNA, 1527 bp, artificial sequence
  >GCF_000169235|JBAGCDPO_01429 16S ribosomal RNA
acgagagtttgatcctggctcaggatgaacgctggcggcgtgcttaacacatgcaagtcgagcgaagcacttaagtttgattcttcggatgaagacttttgtgactgagcggcggacgggtgagtaacgcgtgggtaacctgcctcatacagggggataacagttagaaatggctgctaataccgcataagaccacagtactgcatggtacagtggtaaaaactccggtggtatgagatggacccgcgtctgattaggtagttggtgaggtaacggcccaccaagccgacgatcagtagccgacctgagagggtgaccggccacattgggactgagacacggcccagactcctacgggaggcagcagtggggaatattgcacaatgggcgaaagcctgatgcagcgacgccgcgtgaaggatgaagtatttcggtatgtaaacttctatcagcagggaagaaaatgacggtacctgactaagaagccccggctaactacgtgccagcagccgcggtaatacgtagggggcaagcgttatccggatttactgggtgtaaagggagcgtagacggctgtgcaagtctgaagtgaaaggcatgggctcaacctgtggactgctttggaaactgtgcagctagagtgtcggagaggtaagtggaattcctagtgtagcggtgaaatgcgtagatattaggaggaacaccagtggcgaaggcggcttactggacgatgactgacgttgaggctcgaaagcgtggggagcaaacaggattagataccctggtagtccacgccgtaaacgatgactgctaggtgtcgggtagcaaagctattcggtgccgcagctaacgcaataagcagtccacctggggagtacgttcgcaagaatgaaactcaaaggaattgacggggacccgcacaagcggtggagcatgtggtttaattcgaagcaacgcgaagaaccttacctgatcttgacatcccgatgaccgcttcgtaatggaagcttttcttcggaacatcggtgacaggtggtgcatggttgtcgtcagctcgtgtcgtgagatgttgggttaagtcccgcaacgagcgcaacccttatcttcagtagccagcatttaggatgggcactctggagagactgccagggataacctggaggaaggtggggatgacgtcaaatcatcatgccccttatgaccagggctacacacgtgctacaatggcgtaaacaaagggaggcagagccgcgaggccgagcaaatctcaaaaataacgtctcagttcggattgtagtctgcaactcgactacatgaagctggaatcgctagtaatcgcagatcagaatgctgcggtgaatacgttcccgggtcttgtacacaccgcccgtcacaccatgggagtcagtaacgcccgaagtcagtgacccaaccgaaaggagggagctgccgaaggtgggaccgataactggggtgaagtcgtaacaaggtagccgtatcggaaggtgcggctggatcacctccttt

SEQ ID NO: 298 - DNA, 1296 bp, artificial sequence
  >GCF_000169235|JBAGCDPO_02683 16S ribosomal RNA
tatgagatggacccgcgtctgattaggtagttggtgaggtaacggcccaccaagccgacgatcagtagccgacctgagagggtgaccggccacattgggactgagacacggcccagactcctacgggaggcagcagtggggaatattgcacaatgggcgaaagcctgatgcagcgacgccgcgtgaaggatgaagtatttcggtatgtaaacttctatcagcagggaagaaaatgacggtacctgactaagaagccccggctaactacgtgccagcagccgcggtaatacgtagggggcaagcgttatccggatttactgggtgtaaagggagcgtagacggctgtgcaagtctgaagtgaaaggcatgggctcaacctgtggactgctttggaaactgtgcagctagagtgtcggagaggtaagtggaattcctagtgtagcggtgaaatgcgtagatattaggaggaacaccagtggcgaaggcggcttactggacgatgactgacgttgaggctcgaaagcgtggggagcaaacaggattagataccctggtagtccacgccgtaaacgatgactgctaggtgtcgggtagcaaagctattcggtgccgcagctaacgcaataagcagtccacctggggagtacgttcgcaagaatgaaactcaaaggaattgacggggacccgcacaagcggtggagcatgtggtttaattcgaagcaacgcgaagaaccttacctgatcttgacatcccgatgaccgcttcgtaatggaagtttttcttcggaacatcggtgacaggtggtgcatggttgtcgtcagctcgtgtcgtgagatgttgggttaagtcccgcaacgagcgcaacccttatcttcagtagccagcatttaggatgggcactctggagagactgccagggataacctggaggaaggtggggatgacgtcaaatcatcatgccccttatgaccagggctacacacgtgctacaatggcgtaaacaaagggaggcagagccgcgaggccgagcaaatctcaaaaataacgtctcagttcggattgtagtctgcaactcgactacatgaagctggaatcgctagtaatcgcagatcagaatgctgcggtgaatacgttcccgggtcttgtacacaccgcccgtcacaccatgggagtcagtaacgcccgaagtcagtgacccaaccgaaaggagggagctgccgaaggtgggaccgataactggggtgaagtcgtaacaaggtagccgtatcggaaggtgcggctggatcacctccttt

SEQ ID NO: 299 - DNA, 1527 bp, artificial sequence
  >GCF_000169235|JBAGCDPO_02881 16S ribosomal RNA
acgagagtttgatcctggctcaggatgaacgctggcggcgtgcttaacacatgcaagtcgagcgaagcacataagttcgattcttcggatgaagacttttgtgactgagcggcggacgggtgagtaacgcgtgggtaacctgcctcatacagggggataacagctagaaatggctgctaataccgcataagaccacagtactgcatggtacagtggtaaaaactccggtggtatgagatggacccgcgtctgattaggtagttggtgaggtaacggcccaccaagccgacgatcagtagccgacctgagagggtgaccggccacattgggactgagacacggcccagactcctacgggaggcagcagtggggaatattgcacaatgggcgaaagcctgatgcagcgacgccgcgtgaaggatgaagtatttcggtatgtaaacttctatcagcagggaagaaaatgacggtacctgactaagaagccccggctaactacgtgccagcagccgcggtaatacgtagggggcaagcgttatccggatttactgggtgtaaagggagcgtagacggctgtgcaagtctgaagtgaaaggcatgggctcaacctgtggactgctttggaaactgtgcagctagagtgtcggagaggtaagtggaattcctagtgtagcggtgaaatgcgtagatattaggaggaacaccagtggcgaaggcggcttactggacgatgactgacgttgaggctcgaaagcgtggggagcaaacaggattagataccctggtagtccacgccgtaaacgatgactgctaggtgtcgggtagcaaagctattcggtgccgcagctaacgcaataagcagtccacctggggagtacgttcgcaagaatgaaactcaaaggaattgacggggacccgcacaagcggtggagcatgtggtttaattcgaagcaacgcgaagaaccttacctgatcttgacatcccgatgaccgcttcgtaatggaagcttttcttcggaacatcggtgacaggtggtgcatggttgtcgtcagctcgtgtcgtgagatgttgggttaagtcccgcaacgagcgcaacccttatcttcagtagccagcatttaggatgggcactctggagagactgccagggataacctggaggaaggtggggatgacgtcaaatcatcatgccccttatgaccagggctacacacgtgctacaatggcgtaaacaaagggaagcagagccgcgaggccgagcaaatctcaaaaataacgtctcagttcggattgtagtctgcaactcgactacatgaagctggaatcgctagtaatcgcagatcagaatgctgcggtgaatacgttcccgggtcttgtacacaccgcccgtcacaccatgggagtcagtaacgcccgaagtcagtgacccaaccgaaaggagggagctgccgaaggtgggaccgataactggggtgaagtcgtaacaaggtagccgtatcggaaggtgcggctggatcacctccttt

SEQ ID NO: 300 - DNA, 1529 bp, artificial sequence
  >GCF_000154065|EBKNHIAM_01676 16S ribosomal RNA
aacgagagtttgatcctggctcaggatgaacgctggcggcgtgcttaacacatgcaagtcgagcgaagcgcttaagtttgattcttcggatgaagacttttgtgactgagcggcggacgggtgagtaacgcgtgggtaacctgcctcatacagggggataacagttagaaatgactgctaataccgcataagaccacggtaccgcatggtacagtggtaaaaactccggtggtatgagatggacccgcgtctgattaggtagttggtggggtaacggcctaccaagccgacgatcagtagccgacctgagagggtgaccggccacattgggactgagacacggcccagactcctacgggaggcagcagtggggaatattgcacaatggaggaaactctgatgcagcgacgccgcgtgaaggatgaagtatttcggtatgtaaacttctatcagcagggaagaaaatgacggtacctgactaagaagccccggctaactacgtgccagcagccgcggtaatacgtagggggcaagcgttatccggatttactgggtgtaaagggagcgtagacggcacggcaagccagatgtgaaagcccggggctcaaccccgggactgcatttggaactgctgagctagagtgtcggagaggcaagtggaattcctagtgtagcggtgaaatgcgtagatattaggaggaacaccagtggcgaaggcggcttgctggacgatgactgacgttgaggctcgaaagcgtggggagcaaacaggattagataccctggtagtccacgccgtaaacgatgactgctaggtgtcgggtggcaaagccattcggtgccgcagctaacgcaataagcagtccacctggggagtacgttcgcaagaatgaaactcaaaggaattgacggggacccgcacaagcggtggagcatgtggtttaattcgaagcaacgcgaagaaccttacctgatcttgacatcccgatgaccgcttcgtaatggaagtttttcttcggaacatcggtgacaggtggtgcatggttgtcgtcagctcgtgtcgtgagatgttgggttaagtcccgcaacgagcgcaacccctatcttcagtagccagcaggttaagctgggcactctggagagactgccagggataacctggaggaaggtggggatgacgtcaaatcatcatgccccttatgaccagggctacacacgtgctacaatggcgtaaacaaagagaagcgaactcgcgagggtaagcaaatctcaaaaataacgtctcagttcggattgtagtctgcaactcgactacatgaagctggaatcgctagtaatcgcagatcagaatgctgcggtgaatacgttcccgggtcttgtacacaccgcccgtcacaccatgggagtcagtaacgcccgaagtcagtgacccaaccgtaaggagggagctgccgaaggtgggaccgataactggggtgaagtcgtaacaaggtagccgtatcggaaggtgcggctggatcacctccttt

SEQ ID NO: 301 - DNA, 825 bp, artificial sequence
  >GCF_000154065|EBKNHIAM_01761 16S ribosomal RNA (partial)
aacgagagtttgatcctggctcaggatgaacgctggcggcgtgcttaacacatgcaagtcgagcgaagcgctttggaaagattcttcggatgatttcctttgtgactgagcggcggacgggtgagtaacgcgtgggtaacctgcctcatacagggggataacagttagaaatgactgctaataccgcataagaccacggtaccgcatggtacagtggtaaaaactccggtggtatgagatggacccgcgtctgattaggtagttggtggggtaacggcctaccaagccgacgatcagtagccgacctgagagggtgaccggccacattgggactgagacacggcccagactcctacgggaggcagcagtggggaatattgcacaatggaggaaactctgatgcagcgacgccgcgtgaaggatgaagtatttcggtatgtaaacttctatcagcagggaagaaaatgacggtacctgactaagaagccccggctaactacgtgccagcagccgcggtaatacgtagggggcaagcgttatccggatttactgggtgtaaagggagcgtagacggcacggcaagccagatgtgaaagcccggggctcaaccccgggactgcatttggaactgctgagctagagtgtcggagaggcaagtggaattcctagtgtagcggtgaaatgcgtagatattaggaggaacaccagtggcgaagcggcttgctggacgatgactgacgttgaggctcgaaagcgtggggagcaaacaggattagataccctggtagtccacgccgtaaacgatgactgctaggtgtcgggtgg

SEQ ID NO: 302 - DNA, 1514 bp, artificial sequence
  >GCA_900066695|JAAICDLI_00064 16S ribosomal RNA
attaagagtttgatcctggctcaggatgaacgctggcggcgtgcctaacacatgcaagtcgagcgagaagccattgaccgatacttcggtaaagggatatggcggaaagcggcggacgggtgagtaacgcgtaggcaacctgccccttacagagggatagccattggaaacgatgattaagacctcataacgcctccctcccacatgagggggaggccaaagattcatcggtaagggatgggcctgcgtctgattagcttgttggcggggtaacggcccaccaaggcgacgatcagtagccgacctgagagggtgatcggccacattggaactgagacacggtccaaactcctacgggaggcagcagtggggaatattgcacaatgggcggaagcctgatgcagcaacgccgcgtgagggatgaaggccttcgggtcgtaaacctctgtccttggggaagaaacaaatgacggtacccatggaggaagccccggctaactacgtgccagcagccgcggtaatacgtagggggcgagcgttatccggaattattgggcgtaaagagtgcgtaggtggttacctaagcgcagggtctaaggcaatggctcaaccattgttcgccctgcgaactgggctacttgagtgcaggagaggaaagcggaattcctagtgtagcggtgaaatgcgtagatattaggaggaacaccagtggcgaaggcggctttctggactgttactgacactgaggcacgaaagcgtggggagcaaacaggattagataccctggtagtccacgccgtaaacgatgagcactaggtgtcggggccgcaaggcttcggtgccgcagttaacgcattaagtgctccgcctggggagtacgcacgcaagtgtgaaactcaaaggaattgacggggacccgcacaagcagcggagcatgtggtttaattcgaagcaacgcgaagaaccttaccaggacttgacatccccctgacagatccttaaccggatccttcttcggacaggggagacaggtggtgcatggttgtcgtcagctcgtgtcgtgagatgttgggttaagtcccgcaacgagcgcaacccttgccattagttgccatcattcagttgggcactctaatgggactgccggggacaactcggaggaaggtggggatgacgtcaaatcatcatgccccttatgttctgggctacacacgtgctacaatggccggtacagcaggaagcgatcccgcgagggggagcaaatcccaaaaaccggtcccagttcggactgcaggctgcaacccgcctgcacgaagccggagttgctagtaatcgtggatcagaatgccacggtgaatgcgttcccgggtcttgtacacaccgcccgtcacaccatggaagttgggggtgcccgaagccggcagggagatatgctgtctaaggcaaaaccaatgactggggtgaagtcgtaacaaggtagccgtatcggaaggtgcggctggatcacctccttt

SEQ ID NO: 303 - DNA, 1537 bp, artificial sequence
  >GCF_000242195|MJIGDLMC_01655 16S ribosomal RNA
atggagagtttgatcctggctcaggatgaacgctggcggcatgcctaatacatgcaagtcgaacgaagtttcgaggaagcttgcttccaaagagacttagtggcgaacgggtgagtaacacgtaggtaacctgcccatgtgtccgggataactgctggaaacggtagctaaaaccggataggtatacagagcgcatgctcagtatattaaagcgcccatcaaggcgtgaacatggatggacctgcggcgcattagctagttggtgaggtaacggcccaccaaggcgatgatgcgtagccggcctgagagggtaaacggccacattgggactgagacacggcccaaactcctacgggaggcagcagtagggaattttcgtcaatgggggaaaccctgaacgagcaatgccgcgtgagtgaagaaggtcttcggatcgtaaagctctgttgtaagtgaagaacggctcatagaggaaatgctatgggagtgacggtagcttaccagaaagccacggctaactacgtgccagcagccgcggtaatacgtaggtggcaagcgttatccggaatcattgggcgtaaagggtgcgtaggtggcgtactaagtctgtagtaaaaggcaatggctcaaccattgtaagctatggaaactggtatgctggagtgcagaagagggcgatggaattccatgtgtagcggtaaaatgcgtagatatatggaggaacaccagtggcgaaggcggtcgcctggtctgtaactgacactgaggcacgaaagcgtggggagcaaataggattagataccctagtagtccacgccgtaaacgatgagaactaagtgttggaggaattcagtgctgcagttaacgcaataagttctccgcctggggagtatgcacgcaagtgtgaaactcaaaggaattgacgggggcccgcacaagcggtggagtatgtggtttaattcgaagcaacgcgaagaaccttaccaggccttgacatggatgcaaatgttctagagatagggggataattatggatcacacaggtggtgcatggttgtcgtcagctcgtgtcgtgagatgttgggttaagtcccgcaacgagcgcaacccttgtcgcatgttaccagcatcaagttggggactcatgcgagactgccggtgacaaaccggaggaaggtggggatgacgtcaaatcatcatgccccttatggcctgggctacacacgtactacaatggcggccacaaagagcagcgacacagtgatgtgaagcgaatctcataaaggtcgtctcagttcggattgaagtctgcaactcgacttcatgaagtcggaatcgctagtaatcgcagatcagcatgctgcggtgaatacgttctcgggccttgtacacaccgcccgtcaaaccatgggagtcagtaatacccgaagccggtggcataaccgtaaggagtgagccgtcgaaggtaggaccgatgactggggttaagtcgtaacaaggtatccctacgggaacgtggggatggatcacctccttt

SEQ ID NO: 304 - DNA, 997 bp, artificial sequence
  >GCF_000242195|MJIGDLMC_02716 16S ribosomal RNA (partial)
atggagagtttgatcctggctcaggatgaacgctggcggcatgcctaatacatgcaagtcgaacgaagtttcgaggaagcttgcttccaaagagacttagtggcgaacgggtgagtaacacgtaggtaacctgcccatgtgtccgggataactgctggaaacggtagctaaaaccggataggtatacagagcgcatgctcagtatattaaagcgcccatcaaggcgtgaacatggatggacctgcggcgcattagctagttggtgaggtaacggcccaccaaggcgatgatgcgtagccggcctgagagggtaaacggccacattgggactgagacacggcccaaactcctacgggaggcagcagtagggaattttcgtcaatgggggaaaccctgaacgagcaatgccgcgtgagtgaagaaggtcttcggatcgtaaagctctgttgtaagtgaagaacggctcatagaggaaatgctatgggagtgacggtagcttaccagaaagccacggctaactacgtgccagcagccgcggtaatacgtaggtggcaagcgttatccggaatcattgggcgtaaagggtgcgtaggtggcgtactaagtctgtagtaaaaggcaatggctcaaccattgtaagctatggaaactggtatgctggagtgcagaagagggcgatggaattccatgtgtagcggtaaaatgcgtagatatatggaggaacaccagtggcgaaggcggtcgcctggtctgtaactgacactgaggcacgaaagcgtggggagcaaataggattagataccctagtagtccacgccgtaaacgatgagaactaagtgttggaggaattcagtgctgcagttaacgcaataagttctccgcctggggagtatgcacgcaagtgtgaaactcaaaggaattgacgggggcccgcacaagcggtggagtatgtggtttaattcgaagcaacgcgaagaaccttaccaggccttgacat

SEQ ID NO: 305 - DNA, 1537 bp, artificial sequence; identical to SEQ ID NO: 303
  >GCF_000242195|MJIGDLMC_03476 16S ribosomal RNA

SEQ ID NO: 306 - DNA, 1537 bp, artificial sequence; identical to SEQ ID NO: 303
  >GCF_000242195|MJIGDLMC_04017 16S ribosomal RNA

SEQ ID NO: 307 - DNA, 1537 bp, artificial sequence; identical to SEQ ID NO: 303
  >GCF_000242195|MJIGDLMC_04346 16S ribosomal RNA

SEQ ID NO: 308 - DNA, 1536 bp, artificial sequence
  >GCF_000225685|BADFAMJP_04945 16S ribosomal RNA
atggagagtttgatcctggctcaggatgaacgctggcggcatgcctaatacatgcaagtcgaacgaagcttcaggaagcttgcttccaaagagacttagtggcgaacgggtgagtaacacgtaggtaacctgcccatgtgtccgggataactgctggaaacggtagctaaaaccggataggtatacagagcgcatgctcagtatattaaagcgcccatcaaggcgtgaacatggatggacctgcggcgcattagctagttggtgaggtaacggcccaccaaggcgatgatgcgtagccggcctgagagggtaaacggccacattgggactgagacacggcccaaactcctacgggaggcagcagtagggaattttcgtcaatgggggaaaccctgaacgagcaatgccgcgtgagtgaagaaggtcttcggatcgtaaagctctgttgtaagtgaagaacggctcatagaggaaatgctatgggagtgacggtagcttaccagaaagccacggctaactacgtgccagcagccgcggtaatacgtaggtggcaagcgttatccggaatcattgggcgtaaagggtgcgtaggtggcgtactaagtctgtagtaaaaggcaatggctcaaccattgtaagctatggaaactggtatgctggagtgcagaagagggcgatggaattccatgtgtagcggtaaaatgcgtagatatatggaggaacaccagtggcgaaggcggtcgcctggtctgtaactgacactgaggcacgaaagcgtggggagcaaataggattagataccctagtagtccacgccgtaaacgatgagaactaagtgttggaggaattcagtgctgcagttaacgcaataagttctccgcctggggagtatgcacgcaagtgtgaaactcaaaggaattgacgggggcccgcacaagcggtggagtatgtggtttaattcgaagcaacgcgaagaaccttaccaggccttgacatggaaacaaataccctagagatagggggataattatggatcacacaggtggtgcatggttgtcgtcagctcgtgtcgtgagatgttgggttaagtcccgcaacgagcgcaacccttgtcgcatgttaccagcatcaagttggggactcatgcgagactgccggtgacaaaccggaggaaggtggggatgacgtcaaatcatcatgccccttatggcctgggctacacacgtactacaatggcgaccacaaagagcagcgacttggtgacaagaagcgaatctcataaaggtcgtctcagttcggattgaagtctgcaactcgacttcatgaagtcggaatcgctagtaatcgcagatcagcatgctgcggtgaatacgttctcgggccttgtacacaccgcccgtcaaaccatgggagtcagtaatacccgaagccggtggcataaccgtaaggagtgagccgtcgaaggtaggaccgatgactggggttaagtcgtaacaaggtatccctacgggaacgtggggatggatcacctccttt

SEQ ID NO: 309 - DNA, 1536 bp, artificial sequence
  >GCF_000165065|BEIFJCLA_04572 16S ribosomal RNA
atggagagtttgatcctggctcaggatgaacgctggcggcatgcctaatacatgcaagtcgaacgaagtctctaggagcttgcttccaaagagacttagtggcgaacgggtgagtaacacgtaggtaacctgcccatgtgtctgggataactgctggaaacggtagctaaaaccggataggtatacggagcgcatgctctgtatattaaagcacccctcaaggtgtgaacatggatggacctgcggcgcattagctagttggtgaggtaacggcccaccaaggcgatgatgcgtagccggcctgagagggtaaacggccacattgggactgagacacggcccaaactcctacgggaggcagcagtagggaattttcgtcaatggggggaaccctgaacgagcaatgccgcgtgagtgaagaaggtcttcggatcgtaaagctctgttgtaagtgaagaacggctcatagaggaaatgctatgggagtgacggtagcttaccagaaagccacggctaactacgtgccagcagccgcggtaatacgtaggtggcaagcgttatccggaatcattgggcgtaaagggtgcgtaggtggcgtactaagtctgtagtaaaaggcaatggctcaaccattgtaagctatggaaactggtaggctagagtgcagaagagggcgatggaattccatgtgtagcggtaaaatgcgtagatatatggaggaacaccagtggcgaaggcggtcgcctggtctgtaactgacactgaggcacgaaagcgtggggagcaaataggattagataccctagtagtccacgccgtaaacgatgagaactaagtgttggaggaattcagtgctgcagttaacgcaataagttctccgcctggggagtatgcacgcaagtgtgaaactcaaaggaattgacgggggcccgcacaagcggtggagtatgtggtttaattcgaagcaacgcgaagaaccttaccaggccttgacatggatgcaaaggctctagagatagagagataattatggatcacacaggtggtgcatggttgtcgtcagctcgtgtcgtgagatgttgggttaagtcccgcaacgagcgcaacccttgtcgcatgttaccagcatcaagttggggactcatgcgagactgccggtgacaaaccggaggaaggtggggatgacgtcaaatcatcatgccccttatggcctgggctacacacgtactacaatggcgaccacaaagagcagcgacttggtgacaaggagcgaatctcataaaggccgtctcagttcggattgaagtctgcaactcgacttcatgaagtcggaatcgctagtaatcgcagatcagcatgctgcggtgaatacgttctcgggccttgtacacaccgcccgtcaaaccatgggagtcagtaatacccgaagccggtggcataaccgtaaggagtgagccgtcgaaggtaggaccgatgactggggttaagtcgtaacaaggtatccctacgggaacgtggggatggatcacctccttt

SEQ ID NO: 310 - DNA, 1537 bp, artificial sequence
  >GCF_000242175|NJFOOMND_02191 16S ribosomal RNA
atggagagtttgatcctggctcaggatgaacgctggcggcatgcctaatacatgcaagtcgaacgaagtttcgaggaagcttgcttccaaagagacttagtggcgaacgggtgagtaacacgtaggtaacctgcccatgtgtccgggataactgctggaaacggtagctaaaaccggataggtatacagagcgcatgctcagtatattaaagcgtccatcaaggcgtgaacatggatggacctgcggcgcattagctagttggtgaggtaacggctcaccaaggcgatgatgcgtagccggcctgagagggtaaacggccacattgggactgagacacggcccaaactcctacgggaggcagcagtagggaattttcgtcaatgggggaaaccctgaacgagcaatgccgcgtgagtgaagaaggtcttcggatcgtaaagctctgttgtaagtgaagaacggctcatagaggaaatgctatgggagtgacggtagcttaccagaaagccacggctaactacgtgccagcagccgcggtaatacgtaggtggcaagcgttatccggaatcattgggcgtaaagggtgcgtaggtggcgtactaagtctgtagtaaaaggcaatggctcaaccattgtaagctatggaaactggtatgctggagtgcagaagagggcgatggaattccatgtgtagcggtaaaatgcgtagatatatggaggaacaccagtggcgaaggcggtcgcctggtctgtaactgacactgaggcacgaaagcgtggggagcaaataggattagataccctagtagtccacgccgtaaacgatgagaactaagtgttggaggaattcagtgctgcagttaacgcaataagttctccgcttggggagtatgcacgcaagtgtgaaactcaaaggaattgacgggggcccgcacaagcggtggagtatgtggtttaattcgaagcaacgcgaagaaccttaccaggccttgacatggaaacaaataccctagagatagggggataattatggatcacacaggtggtgcatggttgtcgtcagctcgtgtcgtgagatgttgggttaagtcccgcaacgagcgcaacccttgtcgcatgttaccagcatcaagttggggactcatgcgagactgccggtgacaaaccggaggaaggtggggatgacgtcaaatcatcatgccccttatggcctgggctacacacgtactacaatggcggccacaaagagcagcgacacagtgatgtgaagcgaatctcataaaggtcgtctcagttcggattgaagtctgcaactcgacttcatgaagtcggaatcgctagtaatcgcagatcagcatgctgcggtgaatacgttctcgggccttgtacacaccgcccgtcaaaccatgggagtcagtaatacccgaagccggtggcataaccgtaaggagtgagccgtcgaaggtaggaccgatgactggggttaagtcgtaacaaggtatccctacgggaacgtggggatggatcacctccttt

SEQ ID NO: 311 - DNA, 1537 bp, artificial sequence
  >GCF_000242175|NJFOOMND_03280 16S ribosomal RNA
atggagagtttgatcctggctcaggatgaacgctggcggcatgcctaatacatgcaagtcgaacgaagtttcgaggaagcttgcttccaaagagacttagtggcgaacgggtgagtaacacgtaggtaacctgcccatgtgtccgggataactgctggaaacggtagctaaaaccggataggtatacagagcgcatgctcagtatattaaagcgcccatcaaggcgtgaacatggatggacctgcggcgcattagctagttggtgaggtaacggcccaccaaggcgatgatgcgtagccggcctgagagggtaaacggccacattgggactgagacacggcccaaactcctacgggaggcagcagtagggaattttcgtcaatgggggaaaccctgaacgagcaatgccgcgtgagtgaagaaggtcttcggatcgtaaagctctgttgtaagtgaagaacggatcatagaggaaatgctatgggagtgacggtagcttaccagaaagccacggctaactacgtgccagcagccgcggtaatacgtaggtggcaagcgttatccggaatcattgggcgtaaagggtgcgtaggtggcgtactaagtctgtagtaaaaggcaatggctcaaccattgtaagctatggaaactggtatgctggagtgcagaagagggcgatggaattccatgtgtagcggtaaaatgcgtagatatatggaggaacaccagtggcgaaggcggtcgcctggtctgtaactgacactgaggcacgaaagcgtggggagcaaataggattagataccctagtagtccacgccgtaaacgatgagaactaagtgttggaggaattcagtgctgcagttaacgcaataagttctccgcctggggagtatgcacgcaagtgtgaaactcaaaggaattgacgggggcccgcacaagcggtggagtatgtggtttaattcgaagcaacgcgaagaaccttaccaggccttgacatggaaacaaataccctagagatagggggataattatggatcacacaggtggtgcatggttgtcgtcagctcgtgtcgtgagatgttgggttaagtcccgcaacgagcgcaacccttgtcgcatgttaccagcatcaagttggggactcatgcgagactgccggtgacaaaccggaggaaggtggggatgacgtcaaatcatcatgccccttatggcctgggctacacacgtactacaatggcggccacaaagagcagcgacacagtgatgtgaagcgaatctcataaaggtcgtctcagttcggattgaagtctgcaactcgacttcatgaagtcggaatcgctagtaatcgcagatcagcatgctgcggtgaatacgttctcgggccttgtacacaccgcccgtcaaaccatgggagtcagtaatacccgaagccggtggcataaccgtaaggagtgagccgtcgaaggtaggaccgatgactggggttaagtcgtaacaaggtatccctacgggaacgtggggatggatcacctccttt

SEQ ID NO: 312 - DNA, 1537 bp, artificial sequence; identical to SEQ ID NO: 311
  >GCF_000242175|NJFOOMND_03586 16S ribosomal RNA

SEQ ID NO: 313 - DNA, 1210 bp, artificial sequence
  >SPC10651|LCDCKKHI_03416 16S ribosomal RNA (partial)
gaacggccacattgggactgagacacggcccagactcctacgggaggcagcagtggggaatattgcgcaatgggggaaaccctgacgcagcaacgccgcgtgattgaagaaggccttcgggttgtaaagatctttaattggggacgaaaaatgacggtacccaaagaataagctccggctaactacgtgccagcagccgcggtaatacgtagggagcaagcgttatccggatttactgggtgtaaagggcgagtaggcgggctggcaagttgggagtgaaatcccggggcttaaccccggaactgctttcaaaactgctggtcttgagtgatggagaggcaggcggaattccgtgtgtagcggtgaaatgcgtagatatacggaggaacaccagtggcgaaggcggcctgctggacattaactgacgctgaggagcgaaagcgtggggagcaaacaggattagataccctggtagtccacgccgtaaacgatggatactaggtgtgggaggtattgaccccttccgtgccggagttaacacaataagtatcccacctggggagtacggccgcaaggttgaaactcaaaggaattgacgggggcccgcacaagcagtggagtatgtggtttaattcgaagcaacgcgaagaaccttaccaggtcttgacatccctctgaccgccctagagatagggtttcccttcggggcagaggtgacaggtggtgcatggttgtcgtcagctcgtgtcgtgagatgttgggttaagtcccgcaacgagcgcaacccttacggttagttgatacgcaagatcactctagccggactgccgttgacaaaacggaggaaggtggggacgacgtcaaatcatcatgccccttatgacctgggctacacacgtactacaatggcagtcatacagagggaagcaaaacagtgatgtggagcaaatccctaaaagctgtcccagttcagattgcaggctgcaactcgcctgcatgaagtcggaattgctagtaatcgcggatcagcatgccgcggtgaatacgttcccgggccttgtacacaccgcccgtcacaccatgagagccggtaatacccgaagtccgtagcctaaccgcaaggagggcgcggccgaaggtaggactggtaattagggtgaagtcgtaacaaggtagccgtatcggaaggtgcggctggatcacctccttt

SEQ ID NO: 314 - DNA, 1530 bp, artificial sequence; identical to SEQ ID NO: 55
  >SPC10987|PGIJJNHC_00268 16S ribosomal RNA

SEQ ID NO: 315 - DNA, 1530 bp, artificial sequence; identical to SEQ ID NO: 56
  >SPC10987|PGIJJNHC_03558 16S ribosomal RNA

SEQ ID NO: 316 - DNA, 1530 bp, artificial sequence; identical to SEQ ID NO: 57
  >SPC10987|PGIJJNHC_03567 16S ribosomal RNA

SEQ ID NO: 317 - DNA, 1530 bp, artificial sequence; identical to SEQ ID NO: 58
  >SPC10987|PGIJJNHC_04151 16S ribosomal RNA

SEQ ID NO: 318 - DNA, 1529 bp, artificial sequence
  >GCF_000146185|PINFBIPJ_00014 16S ribosomal RNA
ttatgagagtttgatcctggctcaggatgaacgctggcggcgtgcttaacacatgcaagtcgaacgaagcatttagaacagattacttcggtttgaagttctttatgactgagtggcggacgggtgagtaacgcgtgggtaacctgccttgtactgggggatagcagctggaaacggctggtaataccgcataagcgcacaatgttgcatgacatggtgtgaaaaactccggtggtataagatggacccgcgtctgattagctagttggtgagataacagcccaccaaggcgacgatcagtagccgacctgagagggtgaccggccacattgggactgagacacggcccagactcctacgggaggcagcagtggggaatattgcacaatggaggaaactctgatgcagcgacgccgcgtgagtgaagaagtaattcgttatgtaaagctctatcagcagggaagatagtgacggtacctgactaagaagctccggctaaatacgtgccagcagccgcggtaatacgtatggagcaagcgttatccggatttactgggtgtaaagggagtgtaggtggccatgcaagtcagaagtgaaaatccggggctcaaccccggaactgcttttgaaactgtaaggctggagtgcaggaggggtgagtggaattcctagtgtagcggtgaaatgcgtagatattaggaggaacaccagtggcgaaggcggctcactggactgtaactgacactgaggctcgaaagcgtggggagcaaacaggattagataccctggtagtccacgccgtaaacgatgaatactaggtgtcggggcccataagggcttcggtgccgcagcaaacgcaataagtattccacctggggagtacgttcgcaagaatgaaactcaaaggaattgacggggacccgcacaagcggtggagcatgtggtttaattcgaagcaacgcgaagaaccttaccaagtcttgacatcctcttgaccggtcagtaatgtggcctttccttcgggacaagagagacaggtggtgcatggttgtcgtcagctcgtgtcgtgagatgttgggttaagtcccgcaacgagcgcaacccctatccttagtagccagcagtaagatgggcactctagggagactgccagggataacctggaggaaggtggggatgacgtcaaatcatcatgccccttatgacttgggctacacacgtgctacaatggcgtaaacaaagtgaagcgaagtcgtgaggccaagcaaatcacaaaaataacgtctcagttcggattgtagtctgcaactcgactacatgaagctggaatcgctagtaatcgcagatcagaatgctgcggtgaatacgttcccgggtcttgtacacaccgcccgtcacaccatgggagtcgaaaatgcccgaagtcggtgacctaacgtaagaaggagccgccgaaggcaggtttgataactggggtgaagtcgtaacaaggtagccgtatcggaaggtgcggctggatcacctccttt

SEQ ID NO: 319 - DNA, 1530 bp, artificial sequence
  >GCF_000146185|PINFBIPJ_00374 16S ribosomal RNA
ttatgagagtttgatcctggctcaggatgaacgctggcggcgtgcttaacacatgcaagtcgaacgaagcatttagaacagattatttcggtatgaagttctttatgactgagtggcggacgggtgagtaacgcgtgggtaacctgccttgtactgggggatagcagctggaaacggctggtaataccgcataagcgcacaatgttgcatgacatggtgtgaaaaactccggtggtataagatggacccgcgtctgattagctagttggtgagataacagcccaccaaggcgacgatcagtagccgacctgagagggtgaccggccacattgggactgagacacggcccagactcctacgggaggcagcagtggggaatattgcacaatggaggaaactctgatgcagcgacgccgcgtgagtgaagaagtaattcgttatgtaaagctctatcagcagggaagatagtgacggtacctgactaagaagctccggctaaatacgtgccagcagccgcggtaatacgtatggagcaagcgttatccggatttactgggtgtaaagggagtgtaggtggccatgcaagtcagaagtgaaaatccggggctcaaccccggaactgcttttgaaactgtaaggctggagtgcaggaggggtgagtggaattcctagtgtagcggtgaaatgcgtagatattaggaggaacaccagtggcgaaggcggctcactggactgtaactgacactgaggctcgaaagcgtggggagcaaacaggattagataccctggtagtccacgccgtaaacgatgaatactaggtgtcggggcccaaaagggcttcggtgccgcagcaaacgcaataagtattccacctggggagtacgttcgcaagaatgaaactcaaaggaattgacggggacccgcacaagcggtggagcatgtggtttaattcgaagcaacgcgaagaaaccttaccaagtcttgacatcccactgaccggacagtaatgtgtcctttccttcgggacagtggtgacaggtggtgcatggttgtcgtcagctcgtgtcgtgagatgttgggttaagtcccgcaacgagcgcaacccctatccttagtagccagcagtaagatgggcactctagggagactgccagggataacctggaggaaggtggggatgacgtcaaatcatcatgccccttatgacttgggctacacacgtgctacaatggcgtaaacaaagtgaagcgaagtcgtgaggccaagcaaatcacaaaaataacgtctcagttcggattgtagtctgcaactcgactacatgaagctggaatcgctagtaatcgcagatcagaatgctgcggtgaatacgttcccgggtcttgtacacaccgcccgtcacaccatgggagtcgaaaatgcccgaagtcggtgacctaacgtaagaaggagccgccgaaggcaggtttgataactggggtgaagtcgtaacaaggtagccgtatcggaaggtgcggctggatcacctccttt

SEQ ID NO: 320 - DNA, 1529 bp, artificial sequence
  >GCF_000146185|PINFBIPJ_00675 16S ribosomal RNA
ttatgagagtttgatcctggctcaggatgaacgctggcggcgtgcttaacacatgcaagtcgaacgaagcatttagaacagattatttcggtatgaagttctttatgactgagtggcggacgggtgagtaacgcgtgggtaacctgccttgtactgggggatagcagctggaaacggctggtaataccgcataagcgcacaatgttgcatgacatagtgtgaaaaactccggtggtataagatggacccgcgtctgattagctagttggtgagataacagcccaccaaggcgacgatcagtagccgacctgagagggtgaccggccacattgggactgagacacggcccagactcctacgggaggcagcagtggggaatattgcacaatggaggaaactctgatgcagcgacgccgcgtgagtgaagaagtaattcgttatgtaaagctctatcagcagggaagatagtgacggtacctgactaagaagctccggctaaatacgtgccagcagccgcggtaatacgtatggagcaagcgttatccggatttactgggtgtaaagggagtgtaggtggccatgcaagtcagaagtgaaaatccggggcttaaccccggaactgcttttgaaactgtaaggctggagtgcaggaggggtgagtggaattcctagtgtagcggtgaaatgcgtagatattaggaggaacaccagtggcgaaggcggctcactggactgtaactgacactgaggctcgaaagcgtggggagcaaacaggattagataccctggtagtccacgccgtaaacgatgaatactaggtgtcggggcccataagggcttcggtgccgcagcaaacgcaataagtattccacctggggagtacgttcgcaagaatgaaactcaaaggaattgacggggacccgcacaagcggtggagcatgtggtttaattcgaagcaacgcgaagaaccttaccaagtcttgacatcccactgaccggacagtaatgtgtcctttccttcgggacagtggtgacaggtggtgcatggttgtcgtcagctcgtgtcgtgagatgttgggttaagtcccgcaacgagcgcaacccctatccttagtagccagcagtaagatgggcactctagggagactgccagggataacctggaggaaggtggggatgacgtcaaatcatcatgccccttatgacttgggctacacacgtgctacaatggcgtaaacaaagtgaagcgaagtcgtgaggccaagcaaatcacaaaaataacgtctcagttcggattgtagtctgcaactcgactacatgaagctggaatcgctagtaatcgcagatcagaatgctgcggtgaatacgttcccgggtcttgtacacaccgcccgtcacaccatgggagtcgaaaatgcccgaagtcggtgacctaacgaaagaaggagccgccgaaggcaggtttgataactggggtgaagtcgtaacaaggtagccgtatcggaaggtgcggctggatcacctccttt

SEQ ID NO: 321 - DNA, 1529 bp, artificial sequence
  >GCF_000146185|PINFBIPJ_00831 16S ribosomal RNA
ttatgagagtttgatcctggctcaggatgaacgctggcggcgtgcttaacacatgcaagtcgaacgaagcatttagaacagattatttcggtatgaagttctttatgactgagtggcggacgggtgagtaacgcgtgggtaacctgccttgtactgggggatagcagctggaaacggctggtaataccgcataagcgcacaatgttgcatgacatggtgtgaaaaactccggtggtataagatggacccgcgtctgattagctagttggtgagataacagcccaccaaggcgacgatcagtagccgacctgagagggtgaccggccacattgggactgagacacggcccagactcctacgggaggcagcagtggggaatattgcacaatggaggaaactctgatgcagcgacgccgcgtgagtgaagaagtaattcgttatgtaaagctctatcagcagggaagatagtgacggtacctgactaagaagctccggctaaatacgtgccagcagccgcggtaatacgtatggagcaagcgttatccggatttactgggtgtaaagggagtgtaggtggccatgcaagtcagaagtgaaaatccggggctcaaccccggaactgcttttgaaactgtgaggctggagtgcaggaggggtgagtggaattcctagtgtagcggtgaaatgcgtagatattaggaggaacaccagtggcgaaggcggctcactggactgtaactgacactgaggctcgaaagcgtggggagcaaacaggattagataccctggtagtccacgccgtaaacgatgaatactaggtgtcggggcccataagggcttcggtgccgcagcaaacgcaataagtattccacctggggagtacgttcgcaagaatgaaactcaaaggaattgacggggacccgcacaagcggtggagcatgtggtttaattcgaagcaacgcgaagaaccttaccaagtcttgacatcccactgaccggacagtaatgtgtcctttccttcgggacagtggagacaggtggtgcatggttgtcgtcagctcgtgtcgtgagatgttgggttaagtcccgcaacgagcgcaacccctatccttagtagccagcagtaagatgggcactctagggagactgccagggataacctggaggaaggtggggatgacgtcaaatcatcatgccccttatgacttgggctacacacgtgctacaatggcgtaaacaaagtgaagcaaagtcgtgaggccaagcaaatcacaaaaataacgtctcagttcggattgtagtctgcaactcgactacatgaagctggaatcgctagtaatcgcagatcagaatgctgcggtgaatacgttcccgggtcttgtacacaccgcccgtcacaccatgggagtcgaaaatgcccgaagtcggtgacctaacgcaagaaggagccgccgaaggcaggtttgataactggggtgaagtcgtaacaaggtagccgtatcggaaggtgcggctggatcacctccttt

SEQ ID NO: 322 - DNA, 1529 bp, artificial sequence
  >GCF_000146185|PINFBIPJ_01903 16S ribosomal RNA
ttatgagagtttgatcctggctcaggatgaacgctggcggcgtgcttaacacatgcaagtcgaacgaagcatttgcgacagattttttcggaatgaagttgcttatgactgagtggcggacgggtgagtaacgcgtgggtaacctgccttgtactgggggatagcagctggaaacggctggtaataccgcataagcgcacaatgttgcatgacatggtgtgaaaaactccggtggtataagatggacccgcgtctgattagctagttggtgagataacagcccaccaaggcgacgatcagtagccgacctgagagggtgaccggccacattgggactgagacacggcccagactcctacgggaggcagcagtggggaatattgcacaatggaggaaactctgatgcagcgacgccgcgtgagtgaagaagtaattcgttatgtaaagctctatcagcagggaagatagtgacggtacctgactaagaagctccggctaaatacgtgccagcagccgcggtaatacgtatggagcaagcgttatccggatttactgggtgtaaagggagtgtaggtggccatgcaagtcagaagtgaaaatccggggctcaaccccggaactgcttttgaaactgtaaggctggagtgcaggaggggtgagtggaattcctagtgtagcggtgaaatgcgtagatattaggaggaacaccagtggcgaaggcggctcactggactgtaactgacactgaggctcgaaagcgtggggagcaaacaggattagataccctggtagtccacgccgtaaacgatgaatactaggtgtcggggcccataagggcttcggtgccgcagcaaacgcaataagtattccacctggggagtacgttcgcaagaatgaaactcaaaggaattgacggggacccgcacaagcggtggagcatgtggtttaattcgaagcaacgcgaagaaccttaccaagtcttgacatcccactgaccggacagtaatgtgtcctttccttcgggacagtggagacaggtggtgcatggttgtcgtcagctcgtgtcgtgagatgttgggttaagtcccgcaacgagcgcaacccctatccttagtagccagcagtaagatgggcactctagggagactgccagggataacctggaggaaggtggggatgacgtcaaatcatcatgccccttatgacttgggctacacacgtgctacaatggcgtaaacaaagtgaagcgaagtcgtgaggccaagcaaatcacaaaaataacgtctcagttcggattgtagtctgcaactcgactacatgaagctggaatcgctagtaatcgcagatcagaatgctgcggtgaatacgttcccgggtcttgtacacaccgcccgtcacaccatgggagtcgaaaatgcccgaagtcggtgacctaacgtaagaaggagccgccgaaggcaggtttgataactggggtgaagtcgtaacaaggtagccgtatcggaaggtgcggctggatcacctccttt

SEQ ID NO: 323 - DNA, 1424 bp, artificial sequence
  >GCF_000173975|DKAPCDKB_00547 16S ribosomal RNA
ctgagtggcggacgggtgagtaacgcgtgggtaacctgccctgtacagggggataacagctggaaacggctgctaataccgcataagcgcacgaggagacatctccttgtgtgaaaaactccggtggtacaggatgggcccgcgtctgattagctggttggcagggtaacggcctaccaaggcaacgatcagtagccggtctgagaggatgaacggccacattggaactgagacacggtccaaactcctacgggaggcagcagtggggaatattgcacaatgggggaaaccctgatgcagcaacgccgcgtgagtgaagaagtatttcggtatgtaaagctctatcagcagggaagataatgacggtacctgactaagaagctccggctaaatacgtgccagcagccgcggtaatacgtatggagcaagcgttatccggatttactgggtgtaaagggtgcgtaggtggcagtgcaagtcagatgtgaaaggccggggctcaaccccggagctgcatttgaaactgctcggctagagtacaggagaggcaggcggaattcctagtgtagcggtgaaatgcgtagatattaggaggaacaccagtggcgaaggcggcctgctggactgttactgacactgaggcacgaaagcgtggggagcaaacaggattagataccctggtagtccacgccgtaaacgatgaatactaggtgtcggggccgtataggcttcggtgccgccgctaacgcagtaagtattccacctggggagtacgttcgcaagaatgaaactcaaaggaattgacggggacccgcacaagcggtggagcatgtggtttaattcgaagcaacgcgaagaaccttaccaggtcttgacatccttctgaccgcaccttaatcggtgctttccttcgggacagaagagacaggtggtgcatggttgtcgtcagctcgtgtcgtgagatgttgggttaagtcccgcaacgagcgcaacccctatcttcagtagccagcaggtaaggctgggcactctggagagactgccagggataacctggaggaaggtggggacgacgtcaaatcatcatgccccttatgatctgggcgacacacgtgctacaatggcggtcacagagtgaggcgaacccgcgagggggagcaaaccacaaaaaggccgtcccagttcggactgtagtctgcaacccgactacacgaagctggaatcgctagtaatcgcgaatcagaatgtcgcggtgaatacgttcccgggtcttgtacacaccgcccgtcacaccatgggagtcggaaatgcccgaagccagtgacccaaccttttggagggagctgtcgaaggtggagccggtaactggggtgaagtcgtaacaaggtagccgtatcggaaggtgcggctggatcacctccttt

SEQ ID NO: 324 - DNA, 1432 bp, artificial sequence
  >GCF_000469345|EBOBJPBI_00933 16S ribosomal RNA
gttctgtgactgagtggcggacgggtgagtaacgcgtggataacctgcctcacacagggggataacagttggaaacgactgctaataccgcataagcgcacagcaccgcatggtgcagtgtgaaaaactccggtggtgtgagatggatccgcgtctgattagcttgttggcggggtaacggcccaccaaggcgacgatcagtagccggcctgagagggcgaccggccacattgggactgagacacggcccagactcctacgggaggcagcagtggggaatattgcacaatgggggaaaccctgatgcagcgacgccgcgtgagcgatgaagtatttcggtatgtaaagctctatcagcagggaagataatgacggtacctgactaagaagctccggctaaatacgtgccagcagccgcggtaatacgtatggagcaagcgttatccggatttactgggtgtaaagggagcgtaggcggtcctgcaagtctgatgtgaaaggccggggctcaaccccgggactgcattggaaactgtaggactagagtgtcggaggggtaagtggaattcctagtgtagcggtgaaatgcgtagatattaggaggaacaccagtggcgaaggcggcttactggacgactactgacgctgaggctcgaaagcgtggggagcaaacaggattagataccctggtagtccacgccgtaaacgatgaatactaggtgttggcaggtaagacctgtcggtgccgcagcaaacgcaataagtattccacctggggagtacgttcgcaagaatgaaactcaaaggaattgacggggacccgcacaagcggtggagcatgtggtttaattcgaagcaacgcgaagaaccttaccaagtcttgacatcccggtgacagaacatgtaatgtgttttcccttcggggcaccggtgacaggtggtgcatggttgtcgtcagctcgtgtcgtgagatgttgggttaagtcccgcaacgagcgcaacccttatccccagtagccagcatttcggatgggcactctgtggagactgccagggacaacctggaggaaggtggggatgacgtcaaatcatcatgccccttatgacttgggctacacacgtgctacaatggcgtaaacaaagggaagcgagaccgcgaggtggagcaaatcccaaaaataacgtcccagttcggattgtagtctgcaactcgactacatgaagctggaatcgctagtaatcgcagatcagaatgctgcggtgaatacgttcccgggtcttgtacacaccgcccgtcacaccatgggagtcggaaatgcccgaagccggtggcctaaccgcaaggaaggagccgtcgaaggcaggtctgataactggggtgaagtcgtaacaaggtagccgtatcggaaggtgcggctggatcacctccttt

SEQ ID NO: 325 - DNA, 1529 bp, artificial sequence
  >GCF_000020605|FPCJLJAB_00010 16S ribosomal RNA
atgagagtttgatcctggctcaggatgaacgctggcggcgtgcttaacacatgcaagtcgaacgaagcactttatttgatttccttcgggactgattattttgtgactgagtggcggacgggtgagtaacgcgtgggtaacctgccttgtacagggggataacagttggaaacggctgctaataccgcataagcgcacggcatcgcatgatgcagtgtgaaaaactccggtggtataagatggacccgcgttggattagctagttggtgaggtaacggcccaccaaggcgacgatccatagccgacctgagagggtgaccggccacattgggactgagacacggcccaaactcctacgggaggcagcagtggggaatattgcacaatgggcgaaagcctgatgcagcgacgccgcgtgagcgaagaagtatttcggtatgtaaagctctatcagcagggaagataatgacggtacctgactaagaagcaccggctaaatacgtgccagcagccgcggtaatacgtatggtgcaagcgttatccggatttactgggtgtaaagggagcgcaggcggtgcggcaagtctgatgtgaaagcccggggctcaaccccggtactgcattggaaactgtcgtactagagtgtcggaggggtaagcggaattcctagtgtagcggtgaaatgcgtagatattaggaggaacaccagtggcgaaggcggcttactggacgataactgacgctgaggctcgaaagcgtggggagcaaacaggattagataccctggtagtccacgccgtaaacgatgaatactaggtgttgggaagcattgcttctcggtgccgtcgcaaacgcagtaagtattccacctggggagtacgttcgcaagaatgaaactcaaaggaattgacggggacccgcacaagcggtggagcatgtggtttaattcgaagcaacgcgaagaaccttaccaagtcttgacatccttctgaccggtacttaaccgtaccttctcttcggagcaggagtgacaggtggtgcatggttgtcgtcagctcgtgtcgtgagatgttgggttaagtcccgcaacgagcgcaacccttatctttagtagccagcggttcggccgggcactctagagagactgccagggataacctggaggaaggcggggatgacgtcaaatcatcatgccccttatgacttgggctacacacgtgctacaatggcgtaaacaaagggaagcaaagctgtgaagccgagcaaatctcaaaaataacgtctcagttcggactgtagtctgcaacccgactacacgaagctggaatcgctagtaatcgcagatcagaatgctgcggtgaatacgttcccgggtcttgtacacaccgcccgtcacaccatgggagttgggaatgcccgaagccagtgacctaaccgaaaggaaggagctgtcgaaggcaggctcgataactggggtgaagtcgtaacaaggtagccgtatcggaaggtgcggctggatcacctccttt

SEQ ID NO: 326 - DNA, 1529 bp, artificial sequence
  >GCF_000020605|FPCJLJAB_00303 16S ribosomal RNA
atgagagtttgatcctggctcaggatgaacgctggcggcgtgcttaacacatgcaagtcgaacgaagcactttatttgatttccttcgggactgattattttgtgactgagtggcggacgggtgagtaacgcgtgggtaacctgccttgtacagggggataacagttggaaacggctgctaataccgcataagcgcacagcatcgcatgatgcagtgtgaaaaactccggtggtataagatggacccgcgttggattagctagttggtgaggtaacggcccaccaaggcgacgatccatagccgacctgagagggtgaccggccacattgggactgagacacggcccaaactcctacgggaggcagcagtggggaatattgcacaatgggcgaaagcctgatgcagcgacgccgcgtgagcgaagaagtatttcggtatgtaaagctctatcagcagggaagataatgacggtacctgactaagaagcaccggctaaatacgtgccagcagccgcggtaatacgtatggtgcaagcgttatccggatttactgggtgtaaagggagcgcaggcggtgcggcaagtctgatgtgaaagcccggggctcaaccccggtactgcattggaaactgtcgtactagagtgtcggaggggtaagcggaattcctagtgtagcggtgaaatgcgtagatattaggaggaacaccagtggcgaaggcggcttactggacgataactgacgctgaggctcgaaagcgtggggagcaaacaggattagataccctggtagtccacgccgtaaacgatgaatactaggtgttgggaagcattgcttctcggtgccgtcgcaaacgcagtaagtattccacctggggagtacgttcgcaagaatgaaactcaaaggaattgacggggacccgcacaagcggtggagcatgtggtttaattcgaagcaacgcgaagaaccttaccaagtcttgacatccttctgaccggtacttaaccgtaccttctcttcggagcaggagtgacaggtggtgcatggttgtcgtcagctcgtgtcgtgagatgttgggttaagtcccgcaacgagcgcaacccttatctttagtagccagcggtccggccgggcactctagagagactgccagggataacctggaggaaggcggggatgacgtcaaatcatcatgccccttatgacttgggctacacacgtgctacaatggcgtaaacaaagggaagcaaagctgtgaagccgagcaaatctcaaaaataacgtctcagttcggactgtagtctgcaacccgactacacgaagctggaatcgctagtaatcgcagatcagaatgctgcggtgaatacgttcccgggtcttgtacacaccgcccgtcacaccatgggagttgggaatgcccgaagccagtgacctaaccgaaaggaaggagctgtcgaaggcaggctcgataactggggtgaagtcgtaacaaggtagccgtatcggaaggtgcggctggatcacctccttt

SEQ ID NO: 327 - DNA, 1529 bp, artificial sequence
  >GCF_000020605|FPCJLJAB_00754 16S ribosomal RNA
atgagagtttgatcctggctcaggatgaacgctggcggcgtgcttaacacatgcaagtcgaacgaagcactttatttgatttccttcgggactgattattttgtgactgagtggcggacgggtgagtaacgcgtgggtaacctgccttgtacagggggataacagttggaaacggctgctaataccgcataagcgcacggcatcgcatgatgcagtgtgaaaaactccggtggtataagatggacccgcgttggattagctagttggtgaggtaacggcccaccaaggcgacgatccatagccgacctgagagggtgaccggccacattgggactgagacacggcccaaactcctacgggaggcagcagtggggaatattgcacaatgggcgaaagcctgatgcagcgacgccgcgtgagcgaagaagtatttcggtatgtaaagctctatcagcagggaagataatgacggtacctgactaagaagcaccggctaaatacgtgccagcagccgcggtaatacgtatggtgcaagcgttatccggatttactgggtgtaaagggagcgcaggcggtgcggcaagtctgatgtgaaagcccggggctcaaccccggtactgcattggaaactgtcgtactagagtgtcggaggggtaagcggaattcctagtgtagcggtgaaatgcgtagatattaggaggaacaccagtggcgaaggcggcttactggacgataactgacgctgaggctcgaaagcgtggggagcaaacaggattagataccctggtagtccgcgccgtaaacgatgaatactaggtgttgggaagcattgcttctcggtgccgtcgcaaacgcagtaagtattccacctggggagtacgttcgcaagaatgaaactcaaaggaattgacggggacccgcacaagcggtggagcatgtggtttaattcgaagcaacgcgaagaaccttaccaagtcttgacatccttctgaccggtacttaaccgtaccttctcttcggagcaggagtgacaggtggtgcatggttgtcgtcagctcgtgtcgtgagatgttgggttaagtcccgcaacgagcgcaacccttatctttagtagccagcggtttggccgggcactctagagagactgccagggataacctggaggaaggcggggatgacgtcaaatcatcatgccccttatgacttgggctacacacgtgctacaatggcgtaaacaaagggaagcaaagctgtgaagccgagcaaatctcaaaaataacgtctcagttcggactgtagtctgcaacccgactacacgaagctggaatcgctagtaatcgcagatcagaatgctgcggtgaatacgttcccgggtcttgtacacaccgcccgtcacaccatgggagttgggaatgcccgaagccagtgacctaaccgaaaggaaggagctgtcgaaggcaggctcgataactggggtgaagtcgtaacaaggtagccgtatcggaaggtgcggctggatcacctccttt

SEQ ID NO: 328 - DNA, 1529 bp, artificial sequence; identical to SEQ ID NO: 325
  >GCF_000020605|FPCJLJAB_01402 16S ribosomal RNA

SEQ ID NO: 329 - DNA, 1529 bp, artificial sequence
  >GCF_000020605|FPCJLJAB_02105 16S ribosomal RNA
atgagagtttgatcctggctcaggatgaacgctggcggcgtgcttaacacatgcaagtcgaacgaagcactttatttgatttccttcgggactgattattttgtgactgagtggcggacgggtgagtaacgcgtgggtaacctgccttgtacagggggataacagttggaaacggctgctaataccgcataagcgcacagcatcgcatgatgcagtgtgaaaaactccggtggtataagatggacccgcgttggattagctagttggtgaggtaacggcccaccaaggcgacgatccatagccgacctgagagggtgaccggccacattgggactgagacacggcccaaactcctacgggaggcagcagtggggaatattgcacaatgggcgaaagcctgatgcagcgacgccgcgtgagcgaagaagtatttcggtatgtaaagctctatcagcagggaagataatgacggtacctgactaagaagcaccggctaaatacgtgccagcagccgcggtaatacgtatggtgcaagcgttatccggatttactgggtgtaaagggagcgcaggcggtgcggcaagtctgatgtgaaagcccggggctcaaccccggtactgcattggaaactgtcgtactagagtgtcggaggggtaagcggaattcctagtgtagcggtgaaatgcgtagatattaggaggaacaccagtggcgaaggcggcttactggacgataactgacgctgaggctcgaaagcgtggggagcaaacaggattagataccctggtagtccacgctgtaaacgatgaatactaggtgttgggaagcattgcttctcggtgccgtcgcaaacgcagtaagtattccacctggggagtacgttcgcaagaatgaaactcaaaggaattgacggggacccgcacaagcggtggagcatgtggtttaattcgaagcaacgcgaagaaccttaccaagtcttgacatccttctgaccggtacttaaccgtaccttctcttcggagcaggagtgacaggtggtgcatggttgtcgtcagctcgtgtcgtgagatgttgggttaagtcccgcaacgagcgcaacccttatctttagtagccagcggtctggccgggcactctagagagactgccagggataacctggaggaaggcggggatgacgtcaaatcatcatgccccttatgacttgggctacacacgtgctacaatggcgtaaacaaagggaagcgaagctgtgaagccgagcaaatctcaaaaataacgtctcagttcggactgtagtctgcaacccgactacacgaagctggaatcgctagtaatcgcagatcagaatgctgcggtgaatacgttcccgggtcttgtacacaccgcccgtcacaccatgggagttgggaatgcccgaagccagtgacctaaccgaaaggaaggagctgtcgaaggcaggctcgataactggggtgaagtcgtaacaaggtagccgtatcggaaggtgcggctggatcacctccttt

SEQ ID NO: 330 - DNA, 1505 bp, artificial sequence; identical to SEQ ID NO: 59
  >GCF_000154325|NCECJGME_00373 16S ribosomal RNA

SEQ ID NO: 331 - DNA, 1505 bp, artificial sequence; identical to SEQ ID NO: 60
  >GCF_000154325|NCECJGME_01093 16S ribosomal RNA

SEQ ID NO: 332 - DNA, 1505 bp, artificial sequence; identical to SEQ ID NO: 61
  >GCF_000154325|NCECJGME_01403 16S ribosomal RNA

SEQ ID NO: 333 - DNA, 1505 bp, artificial sequence; identical to SEQ ID NO: 62
  >GCF_000154325|NCECJGME_01821 16S ribosomal RNA

SEQ ID NO: 334 - DNA, 1535 bp, artificial sequence
  >GCF_000273585|IPMLJOLE_00330 16S ribosomal RNA
atggagagtttgatcctggctcaggatgaacgctggcggcatgcctaatacatgcaagtcgaacgaagtctttaggaagcttgcttccaaagagacttagtggcgaacgggtgagtaacacgtaggtaacctgcccatgtgcccgggataactgctggaaacggtagctaaaaccggataggtatgagggaggcatcttcctcatattaaagcaccttcgggtgtgaacatggatggacctgcggcgcattagctggttggtgaggtaacggcccaccaaggcgatgatgcgtagccgacctgagagggtgaacggccacattgggactgagacacggcccaaactcctacgggaggcagcagtagggaattttcgtcaatggggggaaccctgaacgagcaatgccgcgtgtgtgaagaaggtcttcggatcgtaaagcactgttgtaagtgaagaatgccacatagaggaaatgctatgtgggtgacggtagcttaccagaaagccacggctaactacgtgccagcagccgcggtaatacgtaggtggcaagcgttatccggaatcattgggcgtaaagggtgcgtaggtggcacgataagtctgaagtaaaaggcaacagctcaactgttgtatgctttggaaactgtcgagctagagtgcagaagagggcgatggaattccatgtgtagcggtaaaatgcgtagatatatggaggaacaccagtggcgaaggcggtcgcctggtctgtaactgacactgatgcacgaaagcgtggggagcaaataggattagataccctagtagtccacgccgtaaacgatgagaactaagtgttggagagattcagtgctgcagttaacgcaataagttctccgcctggggagtatgcacgcaagtgtgaaactcaaaggaattgacgggggcccgcacaagcggtggagtatgtggtttaattcgaagcaacgcgaagaaccttaccaggccttgacatggatataaatgttctagagatagaaagatagctatatatcacacaggtggtgcatggttgtcgtcagctcgtgtcgtgagatgttgggttaagtcccgcaacgagcgcaacccttgtcttctgttaccagcattaggttggggactcaggagagactgccggtgacaaaccggaggaaggtggggatgacgtcaaatcatcatgccccttatggcctgggctacacacgtactacaatggcgcctacaaagagcagcgacaccgcgaggtggagcgaatctcataaagggcgtctcagttcggattgaagtctgcaactcgacttcatgaagtcggaatcgctagtaatcgcagatcagcatgctgcggtgaatacgttctcgggccttgtacacaccgcccgtcaaaccatgggagttggtaatacccgaagccggtggcataaccgcaaggagtgagccgtcgaaggtaggaccgatgactggggttaagtcgtaacaaggtatccctacgggaacgtggggatggatcacctccttt

SEQ ID NO: 335 - DNA, 1535 bp, artificial sequence; identical to SEQ ID NO: 334
  >GCF_000273585|IPMLJOLE_00418 16S ribosomal RNA

SEQ ID NO: 336 - DNA, 1535 bp, artificial sequence
  >GCF_000273585|IPMLJOLE_00538 16S ribosomal RNA
atggagagtttgatcctggctcaggatgaacgctggcggcatgcctaatacatgcaagtcgaacgaagtctttaggaagcttgcttccaaagagacttagtggcgaacgggtgagtaacacgtaggtaacctgcccatgtgcccgggataactgctggaaacggtagctaaaaccggataggtatgagggaggcatcttcctcatattaaagcaccttcgggtgtgaacatggatggacctgcggcgcattagctggttggtgaggtaacggcccaccaaggcgatgatgcgtagccgacctgagagggtgaacggccacattgggactgagacacggcccaaactcctacgggaggcagcagtagggaattttcgtcaatggggggaaccctgaacgagcaatgccgcgtgtgtgaagaaggtcttcggatcgtaaagcactgttgtaagtgaagaatgccatatagaggaaatgctatgtgggtgacggtagcttaccagaaagccacggctaactacgtgccagcagccgcggtaatacgtaggtggcaagcgttatccggaatcattgggcgtaaagggtgcgtaggtggcacgataagtctgaagtaaaaggcaacagctcaactgttgtatgctttggaaactgtcgagctagagtgcagaagagggcgatggaattccatgtgtagcggtaaaatgcgtagatatatggaggaacaccagtggcgaaggcggtcgcctggtctgtaactgacactgatgcacgaaagcgtggggagcaaataggattagataccctagtagtccacgccgtaaacgatgagaactaagtgttggagagattcagtgctgcagttaacgcaataagttctccgcctggggagtatgcacgcaagtgtgaaactcaaaggaattgacgggggcccgcacaagcggtggagtatgtggtttaattcgaagcaacgcgaagaaccttaccaggccttgacatggatataaatgttctagagatagaaagatagctatatatcacacaggtggtgcatggttgtcgtcagctcgtgtcgtgagatgttgggttaagtcccgcaacgagcgcaacccttgtcttctgttaccagcattaggttggggactcaggagagactgccggtgacaaaccggaggaaggtggggatgacgtcaaatcatcatgccccttatggcctgggctacacacgtactacaatggcgcctacaaagagcagcgacaccgcgaggtgaagcgaatctcataaagggcgtctcagttcggattgaagtctgcaactcgacttcatgaagtcggaatcgctagtaatcgcagatcagcatgctgcggtgaatacgttctcgggccttgtacacaccgcccgtcaaaccatgggagttggtaatacccgaagccggtggcataaccgcaaggagtgagccgtcgaaggtaggaccgatgactggggttaagtcgtaacaaggtatccctacgggaacgtggggatggatcacctccttt

SEQ ID NO: 337 - DNA, 1535 bp, artificial sequence
  >GCF_000273585|IPMLJOLE_01281 16S ribosomal RNA
atggagagtttgatcctggctcaggatgaacgctggcggcatgcctaatacatgcaagtcgaacgaagtctttaggaagcttgcttccaaagagacttagtggcgaacgggtgagtaacacgtaggtaacctgcccatgtgcccgggataactgctggaaacggtagctaaaaccggataggtatgagggaggcatcttcctcatattaaagcaccttcgggtgtgaacatggatggacctgcggcgcattagctggttggtgaggtaacggcccaccaaggcgatgatgcgtagccgacctgagagggtgaacggccacattgggactgagacacggcccaaactcctacgggaggcagcagtagggaattttcgtcaatggggggaaccctgaacgagcaatgccgcgtgtgtgaagaaggtcttcggatcgtaaagcactgttgtaagtgaagaatgccacatagaggaaatgctatgtgggtgacggtagcttaccagaaagccacggctaactacgtgccagcagccgcggtaatacgtaggtggcaagcgttatccggaatcattgggcgtaaagggtgcgtaggtggcacgataagtctgaagtaaaaggcaacagctcaactgttgtatgctttggaaactgtcgagctagagtgcagaagagggcgatggaattccatgtgtagcggtaaaatgcgtagatatatggaggaacaccagtggcgaaggcggtcgcctggtctgtaactgacactgatgcacgaaagcgtggggagcaaataggattagataccctagtagtccacgccgtaaacgatgagaactaagtgttggagagattcagtgctgcagttaacgcaataagttctccgcctggggagtatgcacgcaagtgtgaaactcaaaggaattgacgggggcccgcacaagcggtggagtatgtggtttaattcgaagcaacgcgaagaaccttaccaggccttgacatggatataaatgttctagagatagaaagatagctatatatcacacaggtggtgcatggttgtcgtcagctcgtgtcgtgagatgttgggttaagtcccgcaacgagcgcaacccttgtcttctgttaccagcattaagttggggactcaggagagactgccggtgacaaaccggaggaaggtggggatgacgtcaaatcatcatgccccttatggcctgggctacacacgtactacaatggcgcctacaaagagcagcgacaccgcgaggtggagcgaatctcataaagggcgtctcagttcggattgaagtctgcaactcgacttcatgaagtcggaatcgctagtaatcgcagatcagcatgctgcggtgaatacgttctcgggccttgtacacaccgcccgtcaaaccatgggagttggtaatacccgaagccggtggcataaccgcaaggagtgagccgtcgaaggtaggaccgatgactggggttaagtcgtaacaaggtatccctacgggaacgtggggatggatcacctccttt

SEQ ID NO: 338 - DNA, 1535 bp, artificial sequence
  >GCF_000273585|IPMLJOLE_02005 16S ribosomal RNA
atggagagtttgatcctggctcaggatgaacgctggcggcatgcctaatacatgcaagtcgaacgaagtctttaggaagcttgcttccaaagagacttagtggcgaacgggtgagtaacacgtaggtaacctgcccatgtgcccgggataactgctggaaacggtagctaaaaccggataggtatgagggaggcatcttcctcatattaaagcaccttcgggtgtgaacatggatggacctgcggcgcattagctggttggtgaggtaacggcccaccaaggcgatgatgcgtagccgacctgagagggtgaacggccacattgggactgagacacggcccaaactcctacgggaggcagcagtagggaattttcgtcaatggggggaaccctgaacgagcaatgccgcgtgtgtgaagaaggtcttcggatcgtaaagcactgttgtaagtgaagaatgccatatagaggaaatgctatgtgggtgacggtagcttaccagaaagccacggctaactacgtgccagcagccgcggtaatacgtaggtggcaagcgttatccggaatcattgggcgtaaagggtgcgtaggtggcacgataagtctgaagtaaaaggcaacagctcaactgttgtatgctttggaaactgtcgagctagagtgcagaagagggcgatggaattccatgtgtagcggtaaaatgcgtagatatatggaggaacaccagtggcgaaggcggtcgcctggtctgtaactgacactgatgcacgaaagcgtggggagcaaataggattagataccctagtagtccacgccgtaaacgatgagaactaagtgttggagagattcagtgctgcagttaacgcaataagttctccgcctggggagtatgcacgcaagtgtgaaactcaaaggaattgacgggggcccgcacaagcggtggagtatgtggtttaattcgaagcaacgcgaagaaccttaccaggccttgacatggatataaatgttctagagatagaaagatagctatatatcacacaggtggtgcatggttgtcgtcagctcgtgtcgtgagatgttgggttaagtcccgcaacgagcgcaacccttgtcttctgttaccagcattaggttggggactcaggagagactgccggtgacaaaccggaggaaggtggggatgacgtcaaatcatcatgccccttatggcctgggctacacacgtactacaatggcgcctacaaagagcagcgacaccgcgaggtggagcgaatctcataaagggcgtctcagttcggattgaagtctgcaactcgacttcatgaagtcggaatcgctagtaatcgcagatcagcatgctgcggtgaatacgttctcgggccttgtacacaccgcccgtcaaaccatgggagttggtaatacccgaagccggtggcataaccgcaaggagtgagccgtcgaaggtaggaccgatgactggggttaagtcgtaacaaggtatccctacgggaacgtggggatggatcacctccttt

SEQ ID NO: 339 - DNA, 1531 bp, artificial sequence
  >GCF_000153885|MCKEIMFN_02162 16S ribosomal RNA
aacgagagtttgatcctggctcaggatgaacgctggcggcgtgcttaatacatgcaagtcgaacgaagcaccttggacagaatccttcgggaggaagaccattgtgactgagtggcggacgggtgagtaacgcgtgggtaacctgccttgtacagggggataacagttggaaacgactgctaataccgcataagcgcacagtaccgcatggtacggtgtgaaaaactccggtggtacaagatggacccgcgtctgattagctggttggtgaggtaacggcccaccaaggcgacgatcagtagccgacttgagagagtgatcggccacattgggactgagacacggcccaaactcctacgggaggcagcagtagggaatattgcacaatgggggaaaccctgatgcagcgacgccgcgtgaaggaagaagtatttcggtatgtaaacttctatcagcaaggaagaaaatgacggtacttgactaagaagccccggctaaatacgtgccagcagccgcggtaatacgtatggggcaagcgttatccggatttactgggtgtaaagggagcgtaggcggcatggcaagtcagaagtgaaagcctggggctcaaccccggaattgcttttgaaactgtcaggctagagtgtcggaggggtaagcggaattcctagtgtagcggtgaaatgcgtagatattaggaggaacaccggtggcgaaggcggcttactggacgattactgacgctgaggctcgaaagcgtggggagcaaacaggattagataccctggtagtccacgccgtaaacgatgaatactaggtgtcgggggacaatagttcctcggtgccgaagcaaacgcattaagtattccacctggggagtacgttcgcaagaatgaaactcaaaggaattgacggggacccgcacaagcggtggagcatgtggtttaattcgaagcaacgcgaagaaccttacctgctcttgacatcccactgacaggtcagtaatgtgaccctttcttcggaacagtggagacaggtggtgcatggttgtcgtcagctcgtgtcgtgagatgttgggttaagtcccgcaacgagcgcaacccttgtctttagtagccagcagtacggctgggcactctagagagactgccagggataacctggaggaaggcggggatgacgtcaaatcatcatgccccttacgagcagggctacacacgtgctacaatggcgtaaacaaagggaagcgaccccgtgagggtaagcaaatctcaaaaataacgtctcagttcggattgtagtctgcaactcgactacatgaagctggaatcgctagtaatcgcgaatcagaatgtcgcggtgaatacgttcccgggtcttgtacacaccgcccgtcacaccatgggagttggatatgcccgaagtcagtgacccaaccgtaaggagggagctgccgaaggtggagccgataactggggtgaagtcgtaacaaggtagccgtatcggaaggtgcggctggatcacctccttt

SEQ ID NO: 340 - DNA, 1509 bp, artificial sequence
  >GCF_000154385|NOBPEHKA_00083 16S ribosomal RNA
tataaagagtttgatcctggctcaggacgaacgctggcggcgcgcctaacacatgcaagtcgaacgagcgagagagagcttgctttcttgagcgagtggcgaacgggtgagtaacgcgtgaggaacctgcctcaaagagggggacaacagttggaaacgactgctaataccgcataagcccacggctcggcatcgagcagagggaaaaggagcaatccgctttgagatggcctcgcgtccgattagctggttggtgaggtaacggcccaccaaggcgacgatcggtagccggactgagaggttgaacggccacattgggactgagacacggcccagactcctacgggaggcagcagtggggaatattgcacaatgggggaaaccctgatgcagcgacgccgcgtggaggaagaaggtcttcggattgtaaactcctgttgttgaggaagataatgacggtactcaacaaggaagtgacggctaactacgtgccagcagccgcggtaaaacgtaggtcacaagcgttgtccggaattactgggtgtaaagggagcgcaggcgggaagacaagttggaagtgaaatccatgggctcaacccatgaactgctttcaaaactgtttttcttgagtagtgcagaggtaggcggaattcccggtgtagcggtggaatgcgtagatatcgggaggaacaccagtggcgaaggcggcctactgggcaccaactgacgctgaggctcgaaagtgtgggtagcaaacaggattagataccctggtagtccacactgtaaacgatgattactaggtgttggaggattgaccccttcagtgccgcagttaacacaataagtaatccacctggggagtacgaccgcaaggttgaaactcaaaggaattgacgggggcccgcacaagcagtggagtatgtggtttaattcgacgcaacgcgaagaaccttaccaagtcttgacatcccttgacgatgctggaaacagtatttctcttcggagcaaggagacaggtggtgcatggttgtcgtcagctcgtgtcgtgagatgttgggttaagtcccgcaacgagcgcaacccttatggtcagttactacgcaagaggactctggccagactgccgttgacaaaacggaggaaggtggggatgacgtcaaatcatcatgccctttatgacttgggctacacacgtactacaatggcgttaaacaaagagaagcaagaccgcgaggtggagcaaaactcagaaacaacgtcccagttcggactgcaggctgcaactcgcctgcacgaagtcggaattgctagtaatcgcagatcagcatgctgcggtgaatacgttcccgggccttgtacacaccgcccgtcacaccatgagagccggggggacccgaagtcggtagtctaaccgcaaggaggacgccgccgaaggtaaaactggtgattggggtgaagtcgtaacaaggtagccgtaggagaacctgcggctggatcacctccttt

SEQ ID NO: 341 - DNA, 1509 bp, artificial sequence
  >GCF_000154385|NOBPEHKA_01556 16S ribosomal RNA
tataaagagtttgatcctggctcaggacgaacgctggcggcgcgcctaacacatgcaagtcgaacgagcgagaggaggtttactttctcaagcgagtggcgaacgggtgagtaacgcgtgaggaacctgcctcaaagagggggacaacagttggaaacgactgctaataccgcataagcccacgacccggcatcgggtagagggaaaaggagcaatccgctttgagatggcctcgcgtccgattagctagttggtgaggtaatggcccaccaaggcgacgatcggtagccggactgagaggttgaacggccacattgggactgagacacggcccagactcctacgggaggcagcagtggggaatattgcacaatgggggaaaccctgatgcagcgacgccgcgtggaggaagaaggtcttcggattgtaaactcctgttgttgaggaagataatgacggtactcaacaaggaagtgacggctaactacgtgccagcagccgcggtaaaacgtaggtcacaagcgttgtccggaattactgggtgtaaagggagcgcaggcgggaagacaagttggaagtgaaatccatgggctcaacccatgaactgctttcaaaactgtttttcttgagtagtgcagaggtaggcggaattcccggtgtagcggtggaatgcgtagatatcgggaggaacaccagtggcgaaggcggcctactgggcaccaactgacgctgaggctcgaaagtgtgggtagcaaacaggattagataccctggtagtccacactgtaaacgatgattactaggtgttggaggattgaccccttcagtgccgcagttaacacaataagtaatccacctggggagtacgaccgcaaggttgaaactcaaaggaattgacgggggcccgcacaagcagtggagtatgtggtttaattcgacgcaacgcgaagaaccttaccaagtcttgacatcctgcgacgcacatagaaatatgtgtttccttcgggacgcagagacaggtggtgcatggttgtcgtcagctcgtgtcgtgagatgttgggttaagtcccgcaacgagcgcaacccttatggtcagttactacgcaagaggactctggccagactgccgttgacaaaacggaggaaggtggggatgacgtcaaatcatcatgccctttatgacttgggctacacacgtactacaatggcgttaaacaaagagaagcaagaccgcgaggtggagcaaaactcagaaacaacgtcccagttcggactgcaggctgcaactcgcctgcacgaagtcggaattgctagtaatcgcagatcagcatgctgcggtgaatacgttcccgggccttgtacacaccgcccgtcacaccatgagagccggggggacccgaagtcggtagtctaaccgcaaggaggacgccgccgaaggtaaaactggtgattggggtgaagtcgtaacaaggtagccgtaggagaacctgcggctggatcacctccttt

SEQ ID NO: 342 - DNA, 1509 bp, artificial sequence
  >GCF_000154385|NOBPEHKA_01788 16S ribosomal RNA
tataaagagtttgatcctggctcaggacgaacgctggcggcgcgcctaacacatgcaagtcgaacgagcgagagagagcttgctttctcaagcgagtggcgaacgggtgagtaacgcgtgaggaacctgcctcaaagagggggacaacagttggaaacgactgctaataccgcataagcccacgacccggcatcgggtagagggaaaaggagcaatccgctttgagatggcctcgcgtccgattagctagttggtgaggtaacggcccaccaaggcgacgatcggtagccggactgagaggttgaacggccacattgggactgagacacggcccagactcctacgggaggcagcagtggggaatattgcacaatgggggaaaccctgatgcagcgacgccgcgtggaggaagaaggtcttcggattgtaaactcctgttgttgaggaagataatgacggtactcaacaaggaagtgacggctaactacgtgccagcagccgcggtaaaacgtaggtcacaagcgttgtccggaattactgggtgtaaagggagcgcaggcgggaagacaagttggaagtgaaatccatgggctcaacccatgaactgctttcaaaactgtttttcttgagtagtgcagaggtaggcggaattcccggtgtagcggtggaatgcgtagatatcgggaggaacaccagtggcgaaggcggcctactgggcaccaactgacgctgaggctcgaaagtgtgggtagcaaacaggattagataccctggtagtccacaccgtaaacgatgattactaggtgttggaggattgaccccttcagtgccgcagttaacacaataagtaatccacctggggagtacgaccgcaaggttgaaactcaaaggaattgacgggggcccgcacaagcagtggagtatgtggtttaattcgacgcaacgcgaagaaccttaccaagtcttgacatcccttgacgatgctggaaacagtatttctcttcggagcaaggagacaggtggtgcatggttgtcgtcagctcgtgtcgtgagatgttgggttaagtcccgcaacgagcgcaacccttatggtcagttactacgcaagaggactctggccagactgccgttgacaaaacggaggaaggtggggatgacgtcaaatcatcatgccctttatgacttgggctacacacgtactacaatggcgttaaacaaagagaagcaagaccgcgaggtggagcaaaactcagaaacaacgtcccagttcggactgcaggctgcaactcgcctgcacgaagtcggaattgctagtaatcgcagatcagcatgctgcggtgaatacgttcccgggccttgtacacaccgcccgtcacaccatgagagccggggggacccgaagtcggtagtctaaccgcaaggaggacgccgccgaaggtaaaactggtgattggggtgaagtcgtaacaaggtagccgtaggagaacctgcggctggatcacctccttt

SEQ ID NO: 343 - DNA, 1509 bp, artificial sequence
  >GCF_000154385|NOBPEHKA_02359 16S ribosomal RNA
tataaagagtttgatcctggctcaggacgaacgctggcggcgcgcctaacacatgcaagtcgaacgagcgagagagagcttgctttctcaagcgagtggcgaacgggtgagtaacgcgtgaggaacctgcctcaaagagggggacaacagttggaaacgactgctaataccgcataagcccacgacccggcatcgggtagagggaaaaggagcaatccgctttgagatggcctcgcgtccgattagctggttggtgaggtaacggcccaccaaggcgacgatcggtagccggactgagaggttgaacggccacattgggactgagacacggcccagactcctacgggaggcagcagtggggaatattgcacaatgggggaaaccctgatgcagcgacgccgcgtggaggaagaaggtcttcggattgtaaactcctgttgttgaggaagataatgacggtactcaacaaggaagtgacggctaactacgtgccagcagccgcggtaaaacgtaggtcacaagcgttgtccggaattactgggtgtaaagggagcgcaggcgggaagacaagttggaagtgaaatccatgggctcaacccatgaactgctttcaaaactgtttttcttgagtagtgcagaggtaggcggaattcccggtgtagcggtggaatgcgtagatatcgggaggaacaccagtggcgaaggcggcctactgggcaccaactgacgctgaggctcgaaagtgtgggtagcaaacaggattagataccctggtagtccacaccgtaaacgatgattactaggtgttggaggattgaccccttcagtgccgcagttaacacaataagtaatccacctggggagtacgaccgcaaggttgaaactcaaaggaattgacgggggcccgcacaagcagtggagtatgtggtttaattcgacgcaacgcgaagaaccttaccaagtcttgacatcctgcgacgcacatagaaatatgtgtttccttcgggacgcagagacaggtggtgcatggttgtcgtcagctcgtgtcgtgagatgttgggttaagtcccgcaacgagcgcaacccttatggtcagttactacgcaagaggactctggccagactgccgttgacaaaacggaggaaggtggggatgacgtcaaatcatcatgccctttatgacttgggctacacacgtactacaatggcgttaaacaaagagaagcaagaccgcgaggtggagcaaaactcagaaacaacgtcccagttcggactgcaggctgcaactcgcctgcacgaagtcggaattgctagtaatcgcagatcagcatgctgcggtgaatacgttcccgggccttgtacacaccgcccgtcacaccatgagagccggggggacccgaagtcggtagtctaaccgcaaggaggacgccgccgaaggtaaaactggtgattggggtgaagtcgtaacaaggtagccgtaggagaacctgcggctggatcacctccttt

SEQ ID NO: 344 - DNA, 1509 bp, artificial sequence
  >GCF_000154385|NOBPEHKA_02612 16S ribosomal RNA
tataaagagtttgatcctggctcaggacgaacgctggcggcgcgcctaacacatgcaagtcgaacgagcgagagagagcttgctttctcaagcgagtggcgaacgggtgagtaacgcgtgaggaacctgcctcaaagagggggacaacagttggaaacgactgctaataccgcataagcccacgacccggcatcgggtagagggaaaaggagcaatccgctttgagatggcctcgcgtccgattagctagttggtgaggtaacggcccaccaaggcgacgatcggtagccggactgagaggttgaacggccacattgggactgagacacggcccagactcctacgggaggcagcagtggggaatattgcacaatgggggaaaccctgatgcagcgacgccgcgtggaggaagaaggtcttcggattgtaaactcctgttgttgaggaagataatgacggtactcaacaaggaagtgacggctaactacgtgccagcagccgcggtaaaacgtaggtcacaagcgttgtccggaattactgggtgtaaagggagcgcaggcgggaagacaagttggaagtgaaatccatgggctcaacccatgaactgctttcaaaactgtttttcttgagtagtgcagaggtaggcggaattcccggtgtagcggtggaatgcgtagatatcgggaggaacaccagtggcgaaggcggcctactgggcaccaactgacgctgaggctcgaaagtgtgggtagcaaacaggattagataccctggtagtccacactgtaaacgatgattactaggtgttggaggattgaccccttcagtgccgcagttaacacaataagtaatccacctggggagtacgaccgcaaggttgaaactcaaaggaattgacgggggcccgcacaagcagtggagtatgtggtttaattcgacgcaacgcgaagaaccttaccaagtcttgacatcctgcgacgcacatagaaatatgtgtttccttcgggacgcagagacaggtggtgcatggttgtcgtcagctcgtgtcgtgagatgttgggttaagtcccgcaacgagcgcaacccttatggtcagttactacgcaagaggactctggccagactgccgttgacaaaacggaggaaggtggggatgacgtcaaatcatcatgccctttatgacttgggctacacacgtactacaatggcgttaaacaaagagaagcaagaccgcgaggtggagcaaaactcagaaacaacgtcccagttcggactgcaggctgcaactcgcctgcacgaagtcggaattgctagtaatcgcagatcagcatgctgcggtgaatacgttcccgggccttgtacacaccgcccgtcacaccatgagagccggggggacccgaagtcggtagtctaaccgcaaggaggacgccgccgaaggtaaaactggtgattggggtgaagtcgtaacaaggtagccgtaggagaacctgcggctggatcacctccttt

SEQ ID NO: 345 - DNA, 1509 bp, artificial sequence
  >GCF_000154385|NOBPEHKA_02916 16S ribosomal RNA
tataaagagtttgatcctggctcaggacgaacgctggcggcgcgcctaacacatgcaagtcgaacgagcgagagagagcttgctttctcaagcgagtggcgaacgggtgagtaacgcgtgaggaacctgcctcaaagagggggacaacagttggaaacgactgctaataccgcataagcccacgacccggcatcgggtagagggaaaaggagcaatccgctttgagatggcctcgcgtccgattagctagttggtgaggtaatggcccaccaaggcgacgatcggtagccggactgagaggttgaacggccacattgggactgagacacggcccagactcctacgggaggcagcagtggggaatattgcacaatgggggaaaccctgatgcagcgacgccgcgtggaggaagaaggtcttcggattgtaaactcctgttgttgaggaagataatgacggtactcaacaaggaagtgacggctaactacgtgccagcagccgcggtaaaacgtaggtcacaagcgttgtccggaattattgggtgtaaagggagcgcaggcgggaagacaagttggaagtgaaatccatgggctcaacccatgaactgctttcaaaactgtttttcttgagtagtgcagaggtaggcggaattcccggtgtagcggtggaatgcgtagatatcgggaggaacaccagtggcgaaggcggcctactgggcaccaactgacgctgaggctcgaaagtgtgggtagcaaacaggattagataccctggtagtccacactgtaaacgatgattactaggtgttggaggattgaccccttcagtgccgcagttaacacaataagtaatccacctggggagtacgaccgcaaggttgaaactcaaaggaattgacgggggcccgcacaagcagtggagtatgtggtttaattcgacgcaacgcgaagaaccttaccaagtcttgacatcctgcgacgcacatagaaatatgtgtttccttcgggacgcagagacaggtggtgcatggttgtcgtcagctcgtgtcgtgagatgttgggttaagtcccgcaacgagcgcaacccttatggtcagttactacgcaagaggactctggccagactgccgttgacaaaacggaggaaggtggggatgacgtcaaatcatcatgccctttatgacttgggctacacacgtactacaatggcgttaaacaaagagaagcaagaccgcgaggtggagcaaaactcagaaacaacgtcccagttcggactgcaggctgcaactcgcctgcacgaagtcggaattgctagtaatcgcagatcagcatgctgcggtgaatacgttcccgggccttgtacacaccgcccgtcacaccatgagagccggggggacccgaagtcggtagtctaaccgcaaggaggacgccgccgaaggtaaaactggtgattggggtgaagtcgtaacaaggtagccgtaggagaacctgcggctggatcacctccttt

SEQ ID NO: 346 - DNA, 1529 bp, artificial sequence
  >GCA_900066825|JDGJCHGO_03964 16S ribosomal RNA
tattgagagtttgatcctggctcaggatgaacgctggcggcgtgcttaacacatgcaagtcgaacggagtgcccatgacagaggattcgtccaatggattgggttacttagtggcggacgggtgagtaacgcgtgaggaacctgcctcggagtggggaataacacaacgaaagctgtgctaataccgcatgatacagttgggtcgcatgactctgactgtcaaagatttatcgctctgagatggcctcgcgtctgattagctagttggtggggtaacggcccaccaaggcgacgatcagtagccggactgagaggttgaccggccacattgggactgagacacggcccagactcctacgggaggcagcagtggggaatattgggcaatgggcgcaagcctgacccagcaacgccgcgtgaaggaagaaggctttcgggttgtaaacttcttttctcagggacgaagcaagtgacggtacctgaggaataagccacggctaactacgtgccagcagccgcggtaatacgtaggtggcaagcgttatccggatttactgggtgtaaagggcgtgtaggcgggatcgcaagtcagatgtgaaaactggaggctcaacctccagcctgcatttgaaactgtggttcttgagtactggagaggcagacggaattcctagtgtagcggtgaaatgcgtagatattaggaggaacaccagtggcgaaggcggtctgctggacagcaactgacgctgaggcgcgaaagcgtggggagcaaacaggattagataccctggtagtccacgctgtaaacgatggatactaggtgtggggggtctgaccccctccgtgccgcagttaacacaataagtatcccacctggggagtacgatcgcaaggttgaaactcaaaggaattgacgggggcccgcacaagcggtggagtatgtggtttaattcgaagcaacgcgaagaaccttaccagggcttgacatcccgaggcccggcctagagataggcctttctcttcggagacctcggtgacaggtggtgcatggttgtcgtcagctcgtgtcgtgagatgttgggttaagtcccgcaacgagcgcaacccctattgttagttgctacgcaagagcactctagcgagactgccgttgacaaaacggaggaaggtggggacgacgtcaaatcatcatgccccttatgtcctgggccacacacgtactacaatggtggttaacagagggaggcaagaccgtgaggtggagcaaatccctaaaagccatcccagttcggattgcaggctgcaacccgcctgcatgaagttggaatcgctagtaatcgcggatcagcatgccgcggtgaatacgttcccgggccttgtacacaccgcccgtcacaccatgagagtcgggaacacccgaagtccgtagcctaacagcaatgggggcgcggccgaaggtgggttcgataattggggtgaagtcgtaacaaggtagccgtatcggaaggtgcggctggatcacctccttt

SEQ ID NO: 347 - DNA, 1529 bp, artificial sequence; identical to SEQ ID NO: 64
  >GCA_900066645|DBEMCOBG_02766 16S ribosomal RNA

SEQ ID NO: 348 - DNA, 1530 bp, artificial sequence; identical to SEQ ID NO: 63
  >GCF_000239295|GPJGAEFO_00132 16S ribosomal RNA

SEQ ID NO: 349 - DNA, 1530 bp, artificial sequence
  >GCA_001405555|OFJOBHHC_00309 16S ribosomal RNA
tcagagagtttgatcctggctcaggatgaacgctggcggcgtgcttaacacatgcaagtcgagcgaagcagttaagttgatttcttcggattgattcttgactgactgagcggcggacgggtgagtaacgcgtgggtgacctgccccataccgggggataacagctggaaacggctgctaataccgcataagcgcacagagctgcatggctcggtgtgaaaaactccggtggtatgggatgggcccgcgtctgattaggcagttggcggggtaacggcccaccaaaccgacgatcagtagccggcctgagagggcgaccggccacattgggactgagacacggcccaaactcctacgggaggcagcagtggggaatattgcacaatgggggaaaccctgatgcagcgacgccgcgtgagcgaagaagtatttcggtatgtaaagctctatcagcagggaagataatgacggtacctgactaagaagccccggctaactacgtgccagcagccgcggtaatacgtagggggcaagcgttatccggatttactgggtgtaaagggagcgtagacggcaaggcaagtctgatgtgaaaacccagggcttaaccctgggactgcattggaaactgtctggctcgagtgccggagaggtaagcggaattcctagtgtagcggtgaaatgcgtagatattaggaagaacaccagtggcgaaggcggcttactggacggtaactgacgttgaggctcgaaagcgtggggagcaaacaggattagataccctggtagtccacgccgtaaacgatgaatgctaggtgttggggagcaaagctcttcggtgccgccgcaaacgcattaagcattccacctggggagtacgttcgcaagaatgaaactcaaaggaattgacggggacccgcacaagcggtggagcatgtggtttaattcgaagcaacgcgaagaaccttaccaggtcttgacatcccgatgaccggcccgtaacggggctttctcttcggagcattggagacaggtggtgcatggttgtcgtcagctcgtgtcgtgagatgttgggttaagtcccgcaacgagcgcaacccttatcctcagtagccagcaggtaaagctgggcactctgtggagactgccagggataacctggaggaaggtggggatgacgtcaaatcatcatgccccttatgatctgggctacacacgtgctacaatggcgtaaacaaagggaggcaaagccgcgaggtggagcaaatcccaaaaataacgtctcagttcggactgcagtctgcaactcgactgcacgaagctggaatcgctagtaatcgcgaatcagaatgtcgcggtgaatacgttcccgggtcttgtacacaccgcccgtcacaccatgggagttggtaacgcccgaagtcagtgacccaaccttttaggagggagctgccgaaggcgggactgataactggggtgaagtcgtaacaaggtagccgtatcggaaggtgcggctggatcacctccttt

SEQ ID NO: 350 - DNA, 1305 bp, artificial sequence
  >SPC10383|KCGKKHOP_02957 16S ribosomal RNA
aaaggatttattcgcttcaggatggactcgcgtccaattagctagttggtgaggtaacggcccaccaaggcgacgattggtagccggactgagaggttgaacggccacattgggactgagacacggcccagactcctacgggaggcagcagtgggggatattgcacaatgggggaaaccctgatgcagcgacgccgcgtggaggaagaaggttttcggattgtaaactcctgtcgttagggacgataatgacggtacctaacaagaaagcaccggctaactacgtgccagcagccgcggtaaaacgtagggtgcaagcgttgtccggaattactgggtgtaaagggagcgcaggcggaccggcaagttggaagtgaaatccatgggctcaacccgtgaattgctttcaaaactgctggccttgagtagtgcagaggtaggtggaattcccggtgtagcggtggaatgcgtagatatcgggaggaacaccagtggcgaaggcgacctactgggcaccaactgacgctgaggctcgaaagcatgggtagcaaacaggattagataccctggtagtccatgccgtaaacgatgattactaggtgttggaggattgaccccttcagtgccgcagttaacacaataagtaatccacctggggagtacgaccgcaaggttgaaactcaaaggaattgacgggggcccgcacaagcagtggagtatgtggtttaattcgaagcaacgcgaagaaccttaccaggtcttgacatccgatgcatagtgcagagatgcatgaagtccttcgggacatcgagacaggtggtgcatggttgtcgtcagctcgtgtcgtgagatgttgggttaagtcccgcaacgagcgcaacccttattgccagttactacgcaagaggactctggcgagactgccgttgacaaaacggaggaaggtggggatgacgtcaaatcatcatgccctttatgacctgggctacacacgtactacaatggcgtttaacaaagagaagcaagaccgcgaggtggagcaaaactcagaaacaacgtctcagttcagattgcaggctgcaactcgcctgcatgaagtcggaattgctagtaatcgcggatcagcatgccgcggtgaatacgttcccgggccttgtacacaccgcccgtcacaccatgagagccggggggacccgaagtcggtagtctaaccgcaaggaggacgccgccgaaggtaaaactggtgattggggtgaagtcgtaacaaggtagccgtatcggaaggtgcggctggatcacctccttt

SEQ ID NO: 351 - DNA, 1307 bp, artificial sequence; identical to SEQ ID NO: 65
  >SPC10676|BNNMOMCD_02995 16S ribosomal RNA

SEQ ID NO: 352 - DNA, 1264 bp, artificial sequence; identical to SEQ ID NO: 66
  >GCF_000157995|GAIEDKPD_00018 16S ribosomal RNA (partial)

SEQ ID NO: 353 - DNA, 1253 bp, artificial sequence
  >SPC10710|GNNPDKLC_02969 16S ribosomal RNA (partial)
ggctcaccaaggcgacgatcagtagccggactgagaggttggccggccacattgggactgagacacggcccagactcctacgggaggcagcagtggggaatattgggcaatgggcgaaagcctgacccagcaacgccgcgtgaaggaagaaggccctcgggttgtaaacttcttttgtcagggacgaagcaagtgacggtacctgacgaataagccacggctaactacgtgccagcagccgcggtaatacgtaggtggcaagcgttatccggatttactgggtgtaaagggcgtgtaggcgggagtgcaagtcagatgtgaaaactatgggctcaacccatagcctgcatttgaaactgtacttcttgagtgatggagaggcaggcggaattccctgtgtagcggtgaaatgcgtagatatagggaggaacaccagtggcgaaggcggcctgctggacattaactgacgctgaggcgcgaaagcgtggggagcaaacaggattagataccctggtagtccacgccgtaaacgatggatactaggtgtggggggtctgaccccctccgtgccgcagttaacacaataagtatcccacctggggagtacgatcgcaaggttgaaactcaaaggaattgacgggggcccgcacaagcggtggagtatgtggtttaattcgaagcaacgcgaagaaccttaccaggacttgacatcctactaacgaagcagagatgcataaggtgcccttcggggaaagtagagacaggtggtgcatggttgtcgtcagctcgtgtcgtgagatgttgggttaagtcccgcaacgagcgcaacccttattgttagttgctacgcaagagcactctagcgagactgccgttgacaaaacggaggaaggtggggacgacgtcaaatcatcatgccccttatgtcctgggccacacacgtactacaatggcggtcaacagagggaagcaaagccgcgaggtggagcaaatccctaaaagccgtcccagttcggattgcaggctgaaactcgcctgtatgaagtcggaatcgctagtaatcgcggatcagcatgccgcggtgaatacgttcccgggccttgtacacaccgcccgtcacaccatgagagtcgggaacacccgaagtccgtagcctaacagcaatgggggcgcggccgaaggtgggttcgataattggggtgaagtcgtaacaaggtagccgtatcggaaggtgcggctggatcacctccttt

SEQ ID NO: 354 - DNA, 1530 bp, artificial sequence
  >SPC10896|PKADNJIL_02878 16S ribosomal RNA
ttatgagagtttgatcctggctcaggatgaacgctggcggcgtgcttaacacatgcaagtcgaacgaagcatttgcgacagatttcttcggattgaagttgcttatgactgagtggcggacgggtgagtaacgcgtgggtaacctgcctcacacagggggatagcagttggaaacggctgataataccgcataagcgcacagtaccgcatggtacagtgtgaaaaactccggtggtgtgagatggacccgcgtctgattagcttgttggcagggtaacggcctaccaaggcaacgatcagtagccgacctgagagggtgaccggccacattgggactgagacacggcccagactcctacgggaggcagcagtggggaatattgcacaatggaggaaactctgatgcagcgacgccgcgtgagtgaagaagtaattcgttatgtaaagctctatcagcagggaagatagtgacggtacctgactaagaagctccggctaaatacgtgccagcagccgcggtaatacgtatggagcaagcgttatccggatttactgggtgtaaagggagtgtaggtggcatcacaagtcagaagtgaaagcccggggctcaaccccgggactgcttttgaaactgtggagctggagtgcaggagaggcaagtggaattcctagtgtagcggtgaaatgcgtagatattaggaggaacaccagtggcgaaggcggcttgctggactgtaactgacactgaggctcgaaagcgtggggagcaaacaggattagataccctggtagtccacgccgtaaacgatgaatactaggtgtcggggctcataagagcttcggtgccgcagcaaacgcaataagtattccacctggggagtacgttcgcaagaatgaaactcaaaggaattgacggggacccgcacaagcggtggagcatgtggtttaattcgaagcaacgcgaagaaccttaccaagtcttgacatcctcttgcccggtcagtaatgtgaccttttcttcggaacaagagtgacaggtggtgcatggttgtcgtcagctcgtgtcgtgagatgttgggttaagtcccgcaacgagcgcaacccctattcttagtagccagcatttaaggtgggcactctaggaagactgccagggataacctggaggaaggtggggatgacgtcaaatcatcatgccccttatgacttgggctacacacgtgctacaatggcgtaaacaaagtgaagcgagagtgtgagcttaagcaaatcacaaaaataacgtctcagttcggattgtagtctgcaactcgactacatgaagctggaatcgctagtaatcgcgaatcagaatgtcgcggtgaatacgttcccgggtcttgtacacaccgcccgtcacaccatgggagtcggaaatgcccgaagtcggtgacctaacgaaagaaggagccgccgaaggcaggtctgataactggggtgaagtcgtaacaaggtagccgtatcggaaggtgcggctggatcacctccttt

SEQ ID NO: 355 - DNA, 1530 bp, artificial sequence
  GCA_001405835|LAPFHGJD_02535 16S ribosomal RNA
ttatgagagtttgatcctggctcaggatgaacgctggcggcgtgcttaacacatgcaagtcgaacgaagcatttaagacagattacttcggtttgaagtcttttatgactgagtggcggacgggtgagtaacgcgtgggtaacctgcctcatacagggggatagcagctggaaacggctggtaataccgcataagcgcacagtaccacatggtacagtgtgaaaaactccggtggtatgagatggacccgcgtctgattagcttgttggcggggtaacggcccaccaaggcgacgatcagtagccgacctgagagggtgaccggccacattgggactgagacacggcccagactcctacgggaggcagcagtggggaatattgcacaatggaggaaactctgatgcagcgacgccgcgtgagtgaagaagtagttcgctatgtaaagctctatcagcagggaagatagtgacggtacctgactaagaagctccggctaaatacgtgccagcagccgcggtaatacgtatggagcaagcgttatccggatttactgggtgtaaagggagtgtaggtggccaggcaagtcagaagtgaaagcccggggctcaaccccgggactgcttttgaaactgcagggctagagtgcaggaggggcaagtggaattcctagtgtagcggtgaaatgcgtagatattaggaggaacaccagtggcgaaggcggcttgctggactgtaactgacactgaggctcgaaagcgtggggagcaaacaggattagataccctggtagtccacgccgtaaacgatgaatactaggtgtcggggcacataagtgctccggtgccgcagcaaacgcaataagtattccacctggggagtacgttcgcaagaatgaaactcaaaggaattgacggggacccgcacaagcggtggagcatgtggtttaattcgaagcaacgcgaagaaccttaccaagtcttgacatcctcttgaccggtcagtaatgtgaccttttcttcggaacaagagtgacaggtggtgcatggttgtcgtcagctcgtgtcgtgagatgttgggttaagtcccgcaacgagcgcaacccttatccttagtagccagcagttcggctgggcactctagggagactgccagggataacctggaggaaggtggggatgacgtcaaatcatcatgccccttatgacttgggctacacacgtgctacaatggcgtaaacaaagtgaagcgagagcgtgagcttaagcaaatcacaaaaataacgtctcagttcggattgtagtctgcaactcgactacatgaagctggaatcgctagtaatcgcagatcagaatgctgcggtgaatacgttcccgggtcttgtacacaccgcccgtcacaccatgggagtcggaaatgcccgaagtcggtgacctaacgtaagaaggagccgccgaaggcaggtctgataactggggtgaagtcgtaacaaggtagccgtatcggaaggtgcggctggatcacctccttt

SEQ ID NO: 356 - DNA, 1528 bp, artificial sequence
  GCF_000218445|OHMFMPNB_02632 16S ribosomal RNA
aacgagagtttgatcctggctcaggatgaacgctggcggcgtgcctaacacatgcaagtcgagcgaagcactttgcttagattcttcggatgaagaggattgtgactgagcggcggacgggtgagtaacgcgtgggtaacctgcctcatacagggggataacagttagaaatgactgctaataccgcataagaccacagcaccgcatggtgcgggggtaaaaactccggtggtatgagatggacccgcgtctgattagctagttggtaaggtaacggcttaccaaggcgacgatcagtagccgacctgagagggtgaccggccacattgggactgagacacggcccaaactcctacgggaggcagcagtggggaatattgcacaatgggggaaaccctgatgcagcgacgccgcgtgagcgaagaagtatttcggtatgtaaagctctatcagcagggaagaaaatgacggtacctgactaagaagcaccggctaaatacgtgccagcagccgcggtaatacgtatggtgcaagcgttatccggatttactgggtgtaaagggagcgtagacggatgggcaagtctgatgtgaaaacccggggctcaaccccgggactgcattggaaactgttcatctagagtgctggagaggtaagtggaattcctagtgtagcggtgaaatgcgtagatattaggaggaacaccagtggcgaaggcggcttactggacagtaactgacgttgaggctcgaaagcgtggggagcaaacaggattagataccctggtagtccacgccgtaaacgatgactactaggtgtcgggtggcaaagccattcggtgccgcagcaaacgcaataagtagtccacctggggagtacgttcgcaagaatgaaactcaaaggaattgacggggacccgcacaagcggtggagcatgtggtttaattcgaagcaacgcgaagaaccttacctgctcttgacatcccgctgaccggacggtaatgcgtccttcccttcggggcagcggagacaggtggtgcatggttgtcgtcagctcgtgtcgtgagatgttgggttaagtcccgcaacgagcgcaacccctatctttagtagccagcggccaggccgggcactctagagagactgccggggataacccggaggaaggtggggatgacgtcaaatcatcatgccccttatgagcagggctacacacgtgctacaatggcgtaaacaaagggaagcgagaccgcgaggtggagcaaatcccaaaaataacgtctcagttcggattgtagtctgcaactcgactacatgaagctggaatcgctagtaatcgcgaatcagaatgtcgcggtgaatacgttcccgggtcttgtacacaccgcccgtcacaccatgggagtcagtaacgcccgaagtcagtgacccaaccgtaaggagggagctgccgaaggcgggaccgataactggggtgaagtcgtaacaaggtagccgtatcggaaggtgcggctggatcacctccttt

SEQ ID NO: 357 - DNA, 1529 bp, artificial sequence
  GCF_000218465|KMEKDMLC_03101 16S ribosomal RNA
aacgagagtttgatcctggctcaggatgaacgctggcggcgtgcttaacacatgcaagtcgagcgaagcaccttgacggatttcttcggattgaagccttggtgactgagcggcggacgggtgagtaacgcgtgggtaacctgcctcatacagggggataacagttggaaacggctgctaataccgcataagcgcacagtaccgcatggtacggtgtgaaaaactccggtggtatgagatggacccgcgtctgattaggtagttggtggggtaacggcctaccaagccgacgatcagtagccgacctgagagggtgaccggccacattgggactgagacacggcccaaactcctacgggaggcagcagtggggaatattgcacaatgggggaaaccctgatgcagcgacgccgcgtgagcgatgaagtatttcggtatgtaaagctctatcagcagggaagaaaatgacggtacctgactaagaagccccggctaactacgtgccagcagccgcggtaatacgtagggggcaagcgttatccggatttactgggtgtaaagggagcgtagacggcatggcaagccagatgtgaaagcccggggctcaaccccgggactgcatttggaactgtcaggctagagtgtcggagaggaaagcggaattcctagtgtagcggtgaaatgcgtagatattaggaggaacaccagtggcgaaggcggctttctggacgatgactgacgttgaggctcgaaagcgtggggagcaaacaggattagataccctggtagtccacgccgtaaacgatgaatactaggtgtcgggtggcaaagccattcggtgccgcagcaaacgcaataagtattccacctggggagtacgttcgcaagaatgaaactcaaaggaattgacggggacccgcacaagcggtggagcatgtggtttaattcgaagcaacgcgaagaaccttacctggtcttgacatccctctgaccgctctttaatcggagctttccttcgggacagaggagacaggtggtgcatggttgtcgtcagctcgtgtcgtgagatgttgggttaagtcccgcaacgagcgcaacccctatctttagtagccagcattttcggatgggcactctagagagactgccagggataacctggaggaaggtggggatgacgtcaaatcatcatgccccttatgaccagggctacacacgtgctacaatggcgtaaacaaagggaagcgagcccgcgagggggagcaaatcccaaaaataacgtctcagttcggattgtagtctgcaactcgactacatgaagctggaatcgctagtaatcgcgaatcagaatgtcgcggtgaatacgttcccgggtcttgtacacaccgcccgtcacaccatgggagtcagtaacgcccgaagtcagtgacccaaccgcaaggagggagctgccgaaggtgggaccgataactggggtgaagtcgtaacaaggtagccgtatcggaaggtgcggctggatcacctccttt

SEQ ID NO: 358 - DNA, 1528 bp, artificial sequence; identical to SEQ ID NO: 356
  GCF_000209405|ACFAKHHP_02907 16S ribosomal RNA

SEQ ID NO: 359 - DNA, 1527 bp, artificial sequence
  GCF_000218405|ADIHEGGI_03670 16S ribosomal RNA
agagagtttgatcctggctcaggatgaacgctggcggcgtgcctaacacatgcaagtcgaacgaagttacacggaggaagttttcggatggaatcggtataacttagtggcggacgggtgagtaacgcgtgggaaacctgccctgtaccgggggataacacttagaaataggtgctaataccgcataagcgcacggaaccgcatggttccgtgtgaaaaactccggtggtacaggatggtcccgcgtctgattagccagttggcagggtaacggcctaccaaagcgacgatcagtagccggcctgagagggtgaacggccacattgggactgagacacggcccaaactcctacgggaggcagcagtggggaatattgcacaatgggggaaaccctgatgcagcgacgccgcgtgagtgaagaagtatttcggtatgtaaagctctatcagcagggaagaaaatgacggtacctgactaagaagccccggctaactacgtgccagcagccgcggtaatacgtagggggcaagcgttatccggatttactgggtgtaaagggagcgtagacggcatggcaagccagatgtgaaaacccagggctcaaccttgggattgcatttggaactgccaggctggagtgcaggagaggtaagcggaattcctagtgtagcggtgaaatgcgtagatattaggaggaacaccagtggcgaaggcggcttactggactgtaactgacgttgaggctcgaaagcgtggggagcaaacaggattagataccctggtagtccacgcggtaaacgatgattgctaggtgtaggtgggtatggacccatcggtgccgcagctaacgcaataagcaatccacctggggagtacgttcgcaagaatgaaactcaaaggaattgacggggacccgcacaagcggtggagcatgtggtttaattcgaagcaacgcgaagaaccttaccaagtcttgacatccccctgaatatcttgtaaaaaagagatgccttcgggacaggggagacaggtggtgcatggttgtcgtcagctcgtgtcgtgagatgttgggttaagtcccgcaacgagcgcaacccttattcttagtagccagcaggtaaggctgggcactctaaggagactgccggggataacccggaggaaggcggggatgacgtcaaatcatcatgccccttatgatttgggctacacacgtgctacaatggcgtaaacaaagggaagcgagacagtgatgtggagcaaatcccagaaataacgtctcagttcggattgtagtctgcaactcgactacatgaagctggaatcgctagtaatcgcgaatcagcatgtcgcggtgaatacgttcccgggtcttgtacacaccgcccgtcacaccatgggagttggaaatgcccgaagtctgtgacctaaccgaaagggaggagcagccgaaggcaggtctgataactggggtgaagtcgtaacaaggtagccgtatcggaaggtgcggctggatcacctccttt

SEQ ID NO: 360 - DNA, 1527 bp, artificial sequence
  GCF_000218405|ADIHEGGI_04479 16S ribosomal RNA
agagagtttgatcctggctcaggatgaacgctggcggcgtgcctaacacatgcaagtcgaacgaagttatatcgaggaagttttcggatggaatcagtataacttagtggcggacgggtgagtaacgcgtgggaaacctgccctgtaccgggggataacacttagaaataggtgctaataccgcataagcgcacagcttcacatgaagcagtgtgaaaaactccggtggtacaggatggtcccgcgtctgattagccagttggcagggtaacggcctaccaaagcgacgatcagtagccggcctgagagggtgaacggccacattgggactgagacacggcccaaactcctacgggaggcagcagtggggaatattgcacaatgggggaaaccctgatgcagcgacgccgcgtgagtgaagaagtatttcggtatgtaaagctctatcagcagggaagaaaatgacggtacctgactaagaagccccggctaactacgtgccagcagccgcggtaatacgtagggggcaagcgttatccggatttactgggtgtaaagggagcgtagacggcatggcaagccagatgtgaaaacccagggctcaaccttgggattgcatttggaactgtcaggctggagtgcaggagaggtaagcggaattcctagtgtagcggtgaaatgcgtagatattaggaggaacaccagtggcgaaggcggcttactggactgtaactgacgttgaggctcgaaagcgtggggagcaaacaggattagataccctggtagtccacgcggtaaacgatgattgctaggtgtaggtgggtatggacccatcggtgccgcagctaacgcaataagcaatccacctggggagtacgttcgcaagaatgaaactcaaaggaattgacggggacccgcacaagcggtggagcatgtggtttaattcgaagcaacgcgaagaaccttaccaagtcttgacatccccctgactctcctgtaaaagagtgaggccttcgggacattggagacaggtggtgcatggttgtcgtcagctcgtgtcgtgagatgttgggttaagtcccgcaacgagcgcaacccttattcttagtagccagcaggtaaagctgggcactctaaggagactgccggggataacccggaggaaggcggggatgacgtcaaatcatcatgccccttatgatttgggctacacacgtgctacaatggcgtaaacaaagggaagcgagacagtgatgtggagcaaatcccagaaataacgtctcagttcggattgtagtctgcaactcgactacatgaagctggaatcgctagtaatcgcgaatcagcatgtcgcggtgaatacgttcccgggtcttgtacacaccgcccgtcacaccatgggagttggaaatgcccgaagtctgtgacctaaccgaaagggaggagcagccgaaggcaggtctgataactggggtgaagtcgtaacaaggtagccgtatcggaaggtgcggctggatcacctccttt

SEQ ID NO: 361 - DNA, 1527 bp, artificial sequence
  GCF_000218405|ADIHEGGI_06579 16S ribosomal RNA
agagagtttgatcctggctcaggatgaacgctggcggcgtgcctaacacatgcaagtcgaacgaagttacacagaggaagttttcggatggaatcggtataacttagtggcggacgggtgagtaacgcgtgggaaacctgccctgtaccgggggataacacttagaaataggtgctaataccgcataagcgcacggattcacatgaagcagtgtgaaaaactccggtggtacaggatggtcccgcgtctgattagccagttggcagggtaacggcctaccaaagcgacgatcagtagccggcctgagagggtgaacggccacattgggactgagacacggcccaaactcctacgggaggcagcagtggggaatattgcacaatgggggaaaccctgatgcagcgacgccgcgtgagtgaagaagtatttcggtatgtaaagctctatcagcagggaagaaaatgacggtacctgactaagaagccccggctaactacgtgccagcagccgcggtaatacgtagggggcaagcgttatccggatttactgggtgtaaagggagcgtagacggcatggcaagccagatgtgaaaacccagggctcaaccttgggattgcatttggaactgtcaggctggagtgcaggagaggtaagcggaattcctagtgtagcggtgaaatgcgtagatattaggaggaacaccagtggcgaaggcggcttactggactgtaactgacgttgaggctcgaaagcgtggggagcaaacaggattagataccctggtagtccacgcggtaaacgatgattgctaggtgtaggtgggtatggacccatcggtgccgcagctaacgcaataagcaatccacctggggagtacgttcgcaagaatgaaactcaaaggaattgacggggacccgcacaagcggtggagcatgtggtttaattcgaagcaacgcgaagaaccttaccaagtcttgacatcccaatgacgcacctgtaaagaggtgttcccttcggggcattggagacaggtggtgcatggttgtcgtcagctcgtgtcgtgagatgttgggttaagtcccgcaacgagcgcaacccttattcttagtagccagcaggtaaagctgggcactctaaggagactgccggggataacccggaggaaggcggggatgacgtcaaatcatcatgccccttatgatttgggctacacacgtgctacaatggcgtaaacaaagggaagcgagacagtgatgtggagcaaatcccagaaataacgtctcagttcggattgtagtctgcaactcgactacatgaagctggaatcgctagtaatcgcgaatcagcatgtcgcggtgaatacgttcccgggtcttgtacacaccgcccgtcacaccatgggagttggaaatgcccgaagtctgtgacctaaccgaaagggaggagcagccgaaggcaggtctgataactggggtgaagtcgtaacaaggtagccgtatcggaaggtgcggctggatcacctccttt

SEQ ID NO: 362 - DNA, 1532 bp, artificial sequence
  GCF_000218425|CPDMHMPF_01985 16S ribosomal RNA
aacgagagtttgatcctggctcaggatgaacgctggcggcgtgcctaacacatgcaagtcgaacgaagcgcctggccccgacttcttcggaacgaggagccttgcgactgagtggcggacgggtgagtaacgcgtgggcaacctgccttgcactgggggataacagccagaaatggctgctaataccgcataagaccgaagcgccgcatggcgcggcggccaaagccccggcggtgcaagatgggcccgcgtctgattaggtagttggcggggtaacggcccaccaagccgacgatcagtagccgacctgagagggtgaccggccacattgggactgagacacggcccagactcctacgggaggcagcagtggggaatattgcacaatgggggaaaccctgatgcagcgacgccgcgtgaaggatgaagtatttcggtatgtaaacttctatcagcagggaagaagatgacggtacctgactaagaagccccggctaactacgtgccagcagccgcggtaatacgtagggggcaagcgttatccggatttactgggtgtaaagggagcgtagacggcgatgcaagccagatgtgaaagcccggggctcaaccccgggactgcatttggaactgcgtggctggagtgtcggagaggcaggcggaattcctagtgtagcggtgaaatgcgtagatattaggaggaacaccagtggcgaaggcggcctgctggacgatgactgacgttgaggctcgaaagcgtggggagcaaacaggattagataccctggtagtccacgccgtaaacgatgactactaggtgtcgggtggcaaggccattcggtgccgcagcaaacgcaataagtagtccacctggggagtacgttcgcaagaatgaaactcaaaggaattgacggggacccgcacaagcggtggagcatgtggtttaattcgaagcaacgcgaagaaccttacctgatcttgacatcccgatgccaaagcgcgtaacgcgctctttcttcggaacatcggtgacaggtggtgcatggttgtcgtcagctcgtgtcgtgagatgttgggttaagtcccgcaacgagcgcaacccctatcttcagtagccagcattatggatgggcactctggagagactgccagggagaacctggaggaaggtggggatgacgtcaaatcatcatgccccttatgaccagggctacacacgtgctacaatggcgtaaacaaagggaggcgaacccgcgagggtgggcaaatcccaaaaataacgtctcagttcggattgtagtctgcaactcgactacatgaagctggaatcgctagtaatcgcgaatcagaatgtcgcggtgaatacgttcccgggtcttgtacacaccgcccgtcacaccatgggagtcagtaacgcccgaagccggtgacccaacccgtaagggagggagccgtcgaaggtgggaccgataactggggtgaagtcgtaacaaggtagccgtatcggaaggtgcggctggatcacctccttt

SEQ ID NO: 363 - DNA, 1529 bp, artificial sequence
  GCF_000185525|GBMCNOMD_03113 16S ribosomal RNA
atgagagtttgatcctggctcaggatgaacgctggcggcgtgcttaacacatgcaagtcgaacgaaacaccttatttgattttcttcggaactgaagatttggtgattgagtggcggacgggtgagtaacgcgtgggtaacctgccctgtacagggggataacagtcagaaatgactgctaataccgcataagaccacagcaccgcatggtgcaggggtaaaaactccggtggtacaggatggacccgcgtctgattagctggttggtgaggtaacggctcaccaaggcgacgatcagtagccggcttgagagagtgaacggccacattgggactgagacacggcccaaactcctacgggaggcagcagtggggaatattgcacaatgggggaaaccctgatgcagcgacgccgcgtgagtgaagaagtatctcggtatgtaaagctctatcagcagggaagaaaatgacggtacctgactaagaagccccggctaactacgtgccagcagccgcggtaatacgtagggggcaagcgttatccggaattactgggtgtaaagggtgcgtaggtggtatggcaagtcagaagtgaaaacccagggcttaactctgggactgcttttgaaactgtcagactggagtgcaggagaggtaagcggaattcctagtgtagcggtgaaatgcgtagatattaggaggaacatcagtggcgaaggcggcttactggactgaaactgacactgaggcacgaaagcgtggggagcaaacaggattagataccctggtagtccacgccgtaaacgatgaatactaggtgtcggggccgtagaggcttcggtgccgcagccaacgcagtaagtattccacctggggagtacgttcgcaagaatgaaactcaaaggaattgacggggacccgcacaagcggtggagcatgtggtttaattcgaagcaacgcgaagaaccttacctggtcttgacatccttctgaccggtccttaaccggacctttccttcgggacaggagagacaggtggtgcatggttgtcgtcagctcgtgtcgtgagatgttgggttaagtcccgcaacgagcgcaacccctatctttagtagccagcatataaggtgggcactctagagagactgccagggataacctggaggaaggtggggacgacgtcaaatcatcatgccccttatgaccagggctacacacgtgctacaatggcgtaaacagagggaagcagcctcgtgagagtgagcaaatcccaaaaataacgtctcagttcggattgtagtctgcaactcgactacatgaagctggaatcgctagtaatcgcgaatcagaatgtcgcggtgaatacgttcccgggtcttgtacacaccgcccgtcacaccatgggagtcagtaacgcccgaagtcagtgacccaaccgtaaggagggagctgccgaaggcgggaccgataactggggtgaagtcgtaacaaggtagccgtatcggaaggtgcggctggatcacctccttt

SEQ ID NO: 364 - DNA, 1530 bp, artificial sequence
  GCF_000242155|PDMPOPFD_05796 16S ribosomal RNA
tattgagagtttgatcctggctcaggatgaacgctggcggcgtgcttaacacatgcaagtcgaacggggtgctcatgacggaggattcgtccaacggattgagttacctagtggcggacgggtgagtaacgcgtgaggaacctgccttggagaggggaataacactccgaaaggagtgctaataccgcatgatgcagttgggtcgcatggctctgactgccaaagatttatcgctctgagatggcctcgcgtctgattagctagtaggcggggtaacggcccacctaggcgacgatcagtagccggactgagaggttgaccggccacattgggactgagacacggcccagactcctacgggaggcagcagtggggaatattgggcaatgggcgcaagcctgacccagcaacgccgcgtgaaggaagaaggctttcgggttgtaaacttcttttgtcggggacgaaacaaatgacggtacccgacgaataagccacggctaactacgtgccagcagccgcggtaatacgtaggtggcaagcgttatccggatttactgggtgtaaagggcgtgtaggcgggattgcaagtcagatgtgaaaactgggggctcaacctccagcctgcatttgaaactgtagttcttgagtgctggagaggcaatcggaattccgtgtgtagcggtgaaatgcgtagatatacggaggaacaccagtggcgaaggcggattgctggacagtaactgacgctgaggcgcgaaagcgtggggagcaaacaggattagataccctggtagtccacgccgtaaacgatggatactaggtgtggggggtctgaccccctccgtgccgcagttaacacaataagtatcccacctggggagtacgatcgcaaggttgaaactcaaaggaattgacgggggcccgcacaagcggtggagtatgtggtttaattcgaagcaacgcgaagaaccttaccagggcttgacatcccactaacgaagcagagatgcattaggtgcccttcggggaaagtggagacaggtggtgcatggttgtcgtcagctcgtgtcgtgagatgttgggttaagtcccgcaacgagcgcaacccttattgttagttgctacgcaagagcactctagcgagactgccgttgacaaaacggaggaaggtggggacgacgtcaaatcatcatgccccttatgtcctgggccacacacgtactacaatggtggttaacagagggaggcaataccgcgaggtggagcaaatccctaaaagccatcccagttcggattgcaggctgaaacccgcctgtatgaagttggaatcgctagtaatcgcggatcagcatgccgcggtgaatacgttcccgggccttgtacacaccgcccgtcacaccatgagagtcgggaacacccgaagtccgtagcctaaccgcaaggagggcgcggccgaaggtgggttcgataattggggtgaagtcgtaacaaggtagccgtatcggaaggtgcggctggatcacctccttt

SEQ ID NO: 365 - DNA, 1528 bp, artificial sequence; identical to SEQ ID NO: 356
  GCF_000185545|PCENBMEB_02615 16S ribosomal RNA

SEQ ID NO: 366 - DNA, 1226 bp, artificial sequence
  SPC10981|AOEMJKFB_04012 16S ribosomal RNA (partial)
ctgagagggtgaccggccacattgggactgagacacggcccaaactcctacgggaggcagcagtggggaatattgcacaatgggggaaaccctgatgcagcgacgccgcgtgaaggaagaagtatttcggtatgtaaacttctatcagcagggaagaaaatgacggtacctgactaagaagccccggctaattacgtgccagcagccgcggtaatacgtaaggggcaagcgttatccggatttactgggtgtaaagggagcgtagacggcagtgcaagtctgatgtgaaagcccggggctcaaccccgggactgcattggaaactgtgcagctagagtgtcggagaggtaagtggaattcctagtgtagcggtgaaatgcgtagatattaggaggaacaccagtggcgaaggcggcttactggacgataactgacgttgaggctcgaaagcgtggggagcaaacaggattagataccctggtagtccacgccgtaaacgatgaatactaggtgtcgggcgccaaaggcgttcggtgccgcagcaaacgcaataagtattccacctggggagtacgttcgcaagaatgaaactcaaaggaattgacggggacccgcacaagcggtggagcatgtggtttaattcgaagcaacgcgaagaaccttaccaagtcttgacatctgcctgaccggtccgtaacaggacccttccttcgggacaggcaagacaggtggtgcatggttgtcgtcagctcgtgtcgtgagatgttgggttaagtcccgcaacgagcgcaacccttatccttagtagccagcaggtagagctgggcactctagggagactgccagggacaacctggaggaaggtggggatgacgtcaaatcatcatgccccttatgatttgggctacacacgtgctacaatggcgtaaacaaagggaggcgaaggggtgacctggagcaaatcccaaaaataacgtctcagttcggattgtagtctgcaactcgactacatgaagctggaatcgctagtaatcgcgaatcagaatgtcgcggtgaatacgttcccgggtcttgtacacaccgcccgtcacaccatgggagtcggatatgcccgaagccggtgaccgaacccgaaagggaaggagccgtcgaaggtggagccgataactggggtgaagtcgtaacaaggtagccgtatcggaaggtgcggctggatcacctccttt

SEQ ID NO: 367 - DNA, 1529 bp, artificial sequence
  SPC10744|OPBLIJHF_02044 16S ribosomal RNA
tatagagagtttgatcctggctcaggacgaacgctggcggcgtgcttaacacatgcaagtcgaacggagcacccttgactgaggtttcggccaaatgataggaatgcttagtggcggactggtgagtaacgcgtgaggaacctaccttccagagggggacaacagttggaaacgactgctaataccgcatgacgcatgaccggggcatcccgggcatgtcaaagattttatcgctggaagatggcctcgcgtctgattagctagatggtggggtaacggcccaccatggcgacgatcagtagccggactgagaggttgaccggccacattgggactgagatacggcccagactcctacgggaggcagcagtggggaatattgggcaatggacgcaagtctgacccagcaacgccgcgtgaaggaagaaggctttcgggttgtaaacttcttttgtcagggaagagtagaagacggtacctgacgaataagccacggctaactacgtgccagcagccgcggtaatacgtaggtggcaagcgttgtccggatttactgggtgtaaagggcgtgcagccgggccggcaagtcagatgtgaaatctggaggcttaacctccaaactgcatttgaaactgtaggtcttgagtaccggagaggttatcggaattccttgtgtagcggtgaaatgcgtagatataaggaagaacaccagtggcgaaggcggataactggacggcaactgacggtgaggcgcgaaagcgtggggagcaaacaggattagataccctggtagtccacgctgtaaacgatggatactaggtgtgcggggactgaccccctgcgtgccgcagttaacacaataagtatcccacctggggagtacgatcgcaaggttgaaactcaaaggaattgacgggggcccgcacaagcggtggattatgtggtttaattcgaagcaacgcgaagaaccttaccagggcttgacatcctactaacgaagtagagatacatcaggtgcccttcggggaaagtagagacaggtggtgcatggttgtcgtcagctcgtgtcgtgagatgttgggttaagtcccgcaacgagcgcaacccctattgttagttgctacgcaagagcactctagcgagactgccgttgacaaaacggaggaaggtggggacgacgtcaaatcatcatgccccttatgtcctgggctacacacgtaatacaatggcggtcaacagagggaggcaaagccgcgaggcagagcaaacccccaaaagccgtcccagttcggatcgcaggctgcaacccgcctgcgtgaagtcggaatcgctagtaatcgcggatcagcatgccgcggtgaatacgttcccgggccttgtacacaccgcccgtcacaccatgagagtcgggaacacccgaagtccgtagcctaaccgcaaggagggcgcggccgaaggtgggttcgataattggggtgaagtcgtaacaaggtagccgtatcggaaggtgcggctggatcacctccttt

SEQ ID NO: 368 - DNA, 1530 bp, artificial sequence
  SPC10529|CHIMCABN_03373 16S ribosomal RNA
atgagagtttgatcctggctcaggatgaacgctggcggcgtgcttaacacatgcaagtcgaacgaagcactctatttgattttcttcggaaatgaagattttgtgactgagtggcggacgggtgagtaacgcgtgggtaacctgcctcatacagggggataacagttggaaacgactgctaataccgcataagcgcacaggattgcatgatccggtgtgaaaaactccggtggtatgggatggacccgcgtctgattagccagttggcagggtaacggcctaccaaagcgacgatcagtagccgacctgagagggtgaccggccacattgggactgagacacggcccaaactcctacgggaggcagcagtggggaatattgcacaatgggggaaaccctgatgcagcgacgccgcgtgagcgaagaagtatttcggtatgtaaagctctatcagcaggaaagaaaaatgacggtacctgactaagaagcaccggctaaatacgtgccagcagccgcggtaatacgtatggtgcaagcgttatccggatttactgggtgtaaagggagcgcaggcggtgcggcaagtctgatgtgaaagcccggggctcaaccccggtactgcattggaaactgtcgtactagagtgtcggaggggtaagtggaattcctagtgtagcggtgaaatgcgtagatattaggaggaacaccagtggcgaaggcggcttactggacgataactgacgctgaggctcgaaagcgtggggagcaaacaggattagataccctggtagtccacgccgtaaacgatgaatactaggtgtcggggagcattgctcttcggtgccgcagcaaacgcaataagtattccacctggggagtacgttcgcaagaatgaaactcaaaggaattgacggggacccgcacaagcggtggagcatgtggtttaattcgaagcaacgcgaagaaccttaccaagtcttgacatcccgatgacagagtatgtaatgtactttctcttcggagcatcggtgacaggtggtgcatggttgtcgtcagctcgtgtcgtgagatgttgggttaagtcccgcaacgagcgcaacccctgttcttagtagccagcggttcggccgggcactctagggagactgccagggataacctggaggaaggcggggatgacgtcaaatcatcatgccccttatgacttgggctacacacgtgctacaatggcgtaaacaaagggaagcggagccgtgaggccgagcaaatctcaaaaataacgtctcagttcggactgtagtctgcaacccgactacacgaagctggaatcgctagtaatcgcagatcagaatgctgcggtgaatacgttcccgggtcttgtacacaccgcccgtcacaccatgggagttggaaatgcccgaagtcagtgacccaaccgcaaggagggagctgccgaaggcaggttcgataactggggtgaagtcgtaacaaggtagccgtatcggaaggtgcggctggatcacctccttt

SEQ ID NO: 369 - DNA, 1528 bp, artificial sequence; identical to SEQ ID NO: 72
  GCF_000225345|MLGHKGPC_00026 16S ribosomal RNA

SEQ ID NO: 370 - DNA, 1528 bp, artificial sequence; identical to SEQ ID NO: 73
  GCF_000225345|MLGHKGPC_00569 16S ribosomal RNA

SEQ ID NO: 371 - DNA, 1528 bp, artificial sequence; identical to SEQ ID NO: 73
  GCF_000225345|MLGHKGPC_00947 16S ribosomal RNA

SEQ ID NO: 372 - DNA, 1528 bp, artificial sequence; identical to SEQ ID NO: 75
  GCF_000225345|MLGHKGPC_02811 16S ribosomal RNA

SEQ ID NO: 373 - DNA, 1076 bp, artificial sequence
  GCF_000156535|GNJEIKKG_01739 16S ribosomal RNA (partial)
atgagagtttgatcctggctcaggatgaacgctggcggcgtgcttaacacatgcaagtcgaacgaagcactttatttgatttcttcggaatgaagattttgtgactgagtggcggacgggtgagtaacgcgtgggtaacctgcctcatacagggggataacagttggaaacgactgctaataccgcataagcgcacagggtcgcatgacctggtgtgaaaaactccggtggtatgagatggacccgcgtctgattagccagttggtggggtaacggcctaccaaagcgacgatcagtagccgacctgagagggtgaccggccacattgggactgagacacggcccaaactcctacgggaggcagcagtggggaatattgcacaatgggggaaaccctgatgcagcgacgccgcgtgagcgaagaagtatttcggtatgtaaagctctatcagcagggaagaagaaatgacggtacctgactaagaagcaccggctaaatacgtgccagcagccgcggtaatacgtatggtgcaagcgttatccggatttactgggtgtaaagggagcgcaggcggtacggcaagtctgatgtgaaagcccggggctcaaccccggtactgcattggaaactgtcggactagagtgtcggaggggtaagtggaattcctagtgtagcggtgaaatgcgtagatattaggaggaacaccagtggcgaaggcggcttactggacgattactgacgctgaggctcgaaagcgtggggagcaaacaggattagataccctggtagtccacgccgtaaacgatgaatactaggtgtcggggagtattgctcttcggtgccgcagcaaacgcaataagtattccacctggggagtacgttcgcaagaatgaaactcaaaggaattgacggggacccgcacaagcggtggagcatgtggtttaattcgaagcaacgcgaagaaccttaccaagtcttgacatcccggtgacagaacatgtaatgtgttttctcttcggagcatcggtgacaggtggtgcatggttgtcgtcagctcgtgtcgtgagatgttggg

SEQ ID NO: 374 - DNA, 1521 bp, artificial sequence
  SPC10814|contig000120_22_1542
agagtttgatcctggctcaggatgaacgctggcggcgtgcttaacacatgcaagtcgaacgaagcactttgatcgatttcttcggattgaaattttagtgactgagtggcggacgggtgagtaacgcgtgggtaacctgcctcacacagggggataacagttggaaacggctgctaataccgcataagcgcacagtaccgcatggtacagtgtgaaaaactccggtggtgtgagatggacccgcgtctgattagctagttggcagggcaacggcctaccaaggcgacgatcagtagccgacctgagagggtgaccggccacattgggactgagacacggcccaaactcctacgggaggcagcagtggggaatattgcacaatgggggaaaccctgatgcagcgacgccgcgtgagcgaagaagtatttcggtatgtaaagctctatcagcagggaagaagaaatgacggtacctgactaagaagcaccggctaaatacgtgccagcagccgcggtaatacgtatggtgcaagcgttatccggatttactgggtgtaaagggagcgcaggcggaaggctaagtctgatgtgaaagcccggggctcaaccccggtactgcattggaaactggtcatctagagtgtcggaggggtaagtggaattcctagtgtagcggtgaaatgcgtagatattaggaggaacaccagtggcgaaggcggcttactggacgataactgacgctgaggctcgaaagcgtggggagcaaacaggattagataccctggtagtccacgccgtaaacgatgaatactaggtgtcgggaagcacagcttttcggtgccgccgcaaacgcattaagtattccacctggggagtacgttcgcaagaatgaaactcaaaggaattgacggggacccgcacaagcggtggagcatgtggtttaattcgaagcaacgcgaagaaccttaccaagtcttgacatccttctgaccggacagtaatgtgtcctttccttcgggacagaagtgacaggtggtgcatggttgtcgtcagctcgtgtcgtgagatgttgggttaagtcccgcaacgagcgcaacccttatccccagtagccagcggttcggccgggcactctgaggagactgccagggataacctggaggaaggtggggatgacgtcaaatcatcatgccccttatgacttgggctacacacgtgctacaatggcgtaaacaaagggaagcaagaccgtgaggtggagcaaatcccaaaaataacgtctcagttcggactgtagtctgcaacccgactacacgaagctggaatcgctagtaatcgcagatcagaatgctgcggtgaatacgttcccgggtcttgtacacaccgcccgtcacaccatgggagttggaaatgcccgaagtcagtgacccaaccgcaaggagggagctgccgaaggcaggttcgataactggggtgaagtcgtaacaaggtagccgtatcggaaggtgcggctggatcacct

SEQ ID NO: 375 - DNA, 1531 bp, artificial sequence; identical to SEQ ID NO: 76
  GCA_900066395|DFLPCHGC_01805 16S ribosomal RNA

SEQ ID NO: 376 - DNA, 1529 bp, artificial sequence
  GCF_000177015|JIDMOKDH_02648 16S ribosomal RNA
tattgagagtttgatcctggctcaggatgaacgctggcggcgtgcttaacacatgcaagtcgaacggagtgcctttgaaagaggattcgtccaattgataaggttacttagtggcggacgggtgagtaacgcgtgaggaacctgccttggagtggggaataacacagtgaaaattgtgctaataccgcataatgcagttgggccgcatggctctgactgccaaagatttatcgctctgagatggcctcgcgtctgattagctagttggtggggtaacggcccaccaaggcgacgatcagtagccggactgagaggttggccggccacattgggactgagacacggcccagactcctacgggaggcagcagtggggaatattgggcaatgggcgcaagcctgacccagcaacgccgcgtgaaggaagaaggctttcgggttgtaaacttcttttcttagggacgaagcaagtgacggtacctaaggaataagccacggctaactacgtgccagcagccgcggtaatacgtaggtggcaagcgttatccggatttactgggtgtaaagggcgtgtaggcgggattgcaagtcagatgtgaaaaccacgggctcaacctgtggcctgcatttgaaactgtagttcttgagtactggagaggcagacggaattcctagtgtagcggtgaaatgcgtagatattaggaggaacaccagtggcgaaggcggtctgctggacagcaactgacgctgaggcgcgaaagcgtggggagcaaacaggattagataccctggtagtccacgctgtaaacgatggatactaggtgtggggggtctgaccccttccgtgccgcagttaacacaataagtatcccacctggggagtacgatcgcaaggttgaaactcaaaggaattgacgggggcccgcacaagcggtggagtatgtggtttaattcgaagcaacgcgaagaaccttaccagggcttgacatcccgaggcccggtctagagatagacctttctcttcggagacctcggtgacaggtggtgcatggttgtcgtcagctcgtgtcgtgagatgttgggttaagtcccgcaacgagcgcaacccctattgttagttgctacgcaagagcactctagcgagactgccgttgacaaaacggaggaaggtggggacgacgtcaaatcatcatgccccttatgtcctgggccacacacgtactacaatggtggttaacagagggaggcaataccgcgaggtggagcaaacccctaaaagccatcccagttcggattgcaggctgcaacccgcctgcatgaagttggaatcgctagtaatcgcggatcagcatgccgcggtgaatacgttcccgggccttgtacacaccgcccgtcacaccatgagagtcgggaacacccgaagtccgtagcctaaccgcaaggggggcgcggccgaaggtgggttcgataattggggtgaagtcgtaacaaggtagccgtatcggaaggtgcggctggatcacctccttt

SEQ ID NO: 377 - DNA, 1528 bp, artificial sequence
  SPC10470|FPCDEKLF_00420 16S ribosomal RNA
ttagagagtttgatcctggctcaggacgaacgctggcggcgtgcctaacacatgcaagtcgaacggaacttctttaaaggatttcttcggaatgaatttgattaagtttagtggcggacgggtgagtaacgcgtgagtaacctgcctctaagaggggaataacattctgaaaagaatgctaataccgcataatatatatttatcgcatggtagatatatcaaagatttatcgcttagagatggactcgcgtccgattagttagttggtgaggtaacggctcaccaagaccgcgatcggtagccggactgagaggttgaacggccacattgggactgagacacggcccagactcctacgggaggcagcagtgggggatattgcgcaatgggggaaaccctgacgcagcaacgccgcgtgaaggatgaaggtcttcggattgtaaacttcttttattaaggacgaagaaagtgacggtacttaatgaataagctccggctaactacgtgccagcagccgcggtaatacgtagggagcaagcgttgtccggatttactgggtgtaaagggtgcgtaggcggctttgcaagtcagatgtgaaatctatgggctcaacccatagcctgcatttgaaactgcagagcttgagtgaagtagaggcaggcggaattccccgtgtagcggtgaaatgcgtagagatggggaggaacaccagtggcgaaggcggcctgctgggctttaactgacgctgaggcacgaaagcgtgggtagcaaacaggattagataccctggtagtccacgctgtaaacgatgattactaggtgtggggggtctgaccccttccgtgccggagttaacacaataagtaatccacctggggagtacggccgcaaggttgaaactcaaaggaattgacgggggcccgcacaagcagtggagtatgtggtttaattcgaagcaacgcgaagaaccttaccaggtcttgacatcctactaacgagatagagatatgttaggtgcccttcggggaaagtagagacaggtggtgcatggttgtcgtcagctcgtgtcgtgagatgttgggttaagtcccgcaacgagcgcaacccttgctattagttgctacgcaagagcactctaataggactgccgttgacaaaacggaggaaggtggggacgacgtcaaatcatcatgccccttatgacctgggctacacacgtactacaatggacattaacagagggaagcaatacagtgatgtggagcaaacccctaaaaatgttctcagttcagattgcaggctgcaacccgcctgtatgaagatggaattgctagtaatcgcagatcagcatgctgcggtgaatacgttcccgggccttgtacacaccgcccgtcacaccatgggagccggtaatacccgaagtcagtagtctaaccgcaaggaggacgctgccgaaggtaggattggcgactggggtgaagtcgtaacaaggtagccgtatcggaaggtgcggctggatcacctcctt

SEQ ID NO: 378 - DNA, 1528 bp, artificial sequence
  SPC10470|FPCDEKLF_02210 16S ribosomal RNA
ttagagagtttgatcctggctcaggacgaacgctggcggcgtgcctaacacatgcaagtcgaacggaacttctttaaaggatttcttcggaatgaatttgattaagtttagtggcggacgggtgagtaacgcgtgagtaacctgcctctaagtggggaataacattctgaaaagaatgctaataccgcataatatatatttatcgcatggtagatatatcaaagatttatcgcttagagatggactcgcgtccgattagttagttggtgaggtaacggctcaccaagaccgcgatcggtagccggactgagaggttgaacggccacattgggactgagacacggcccagactcctacgggaggcagcagtgggggatattgcgcaatggggggaaccctgacgcagcaacgccgcgtgaaggatgaaggtcttcggattgtaaacttcttttattaaggacgaagaaagtgacggtacttaatgaataagctctggctaactacgtgccagcagccgcggtaatacgtagggagcaagcgttgtccggatttactgggtgtaaagggtgcgtaggcggctttgcaagtcagatgtgaaatctatgggctcaacccatagcctgcatttgaaactgcagagcttgagtgaagtagaggcaggcggaattccccgtgtagcggtgaaatgcgtagagatggggaggaacaccagtggcgaaggcggcctgctgggctttaactgacgctgaggcacgaaagcgtgggtagcaaacaggattagataccctggtagtccacgctgtaaacgatgattactaggtgtggggggtctgaccccttccgtgccggagttaacacaataagtaatccacctggggagtacggccgcaaggttgaaactcaaaggaattgacgggggcccgcacaagcagtggagtatgtggtttaattcgaagcaacgcgaagaaccttaccaggtcttgacatcctactaacgagatagagatatgttaggtgcccttcggggaaagtagagacaggtggtgcatggttgtcgtcagctcgtgtcgtgagatgttgggttaagtcccgcaacgagcgcaacccttgctattagttgctacgcaagagcactctaataggactgccgttgacaaaacggaggaaggtggggacgacgtcaaatcatcatgccccttatgacctgggctacacacgtactacaatggatattaacagagggaagcaatacagtgatgtggagcaaacccctaaaaatgttctcagttcagattgcaggctgcaacccgcctgtatgaagatggaattgctagtaatcgcagatcagcatgctgcggtgaatacgttcccgggccttgtacacaccgcccgtcacaccatgggagccggtaatacccgaagtcagtagtctaaccgcaaggaggacgctgccgaaggtaggattggcgactggggtgaagtcgtaacaaggtagccgtatcggaaggtgcggctggatcacctcctt

SEQ ID NO: 379 - DNA, 1528 bp, artificial sequence
  SPC10470|FPCDEKLF_02214 16S ribosomal RNA
ttagagagtttgatcctggctcaggacgaacgctggcggcgtgcctaacacatgcaagtcgaacggaacttttttaaaagatttcttcggaatgaatttgattaagtttagtggcggacgggtgagtaacgcgtgagtaacctgcctctaagaggggaataacattctgaaaagaatgctaataccgcataatatatatttatcgcatggtagatatatcaaagatttatcgcttagagatggactcgcgtccgattagttagttggtgaggtaacggctcaccaagactgcgatcggtagccggactgagaggttgaacggccacattgggactgagacacggcccagactcctacgggaggcagcagtgggggatattgcgcaatgggggaaaccctgacgcagcaacgccgcgtgaaggatgaaggtcttcggattgtaaacttcttttattaaggacgaagaaagtgacggtacttaatgaataagctccggctaactacgtgccagcagccgcggtaatacgtagggagcaagcgttgtccggatttactgggtgtaaagggtgcgtaggcggctttgcaagtcagatgtgaaatctatgggctcaacccatagcctgcatttgaaactgcagagcttgagtgaagtagaggcaggcggaattccccgtgtagcggtgaaatgcgtagagatggggaggaacaccagtggcgaaggcggcctgctgggctttaactgacgctgaggcacgaaagcgtgggtagcaaacaggattagataccctggtagtccacgctgtaaacgatgattactaggtgtggggggtctgaccccttccgtgccggagttaacacaataagtaatccacctggggagtacggccgcaaggttgaaactcaaaggaattgacgggggcccgcacaagcagtggagtatgtggtttaattcgaagcaacgcgaagaaccttaccaggtcttgacatcctactaacgagatagagatatgttaggtgcccttcggggaaagtagagacaggtggtgcatggttgtcgtcagctcgtgtcgtgagatgttgggttaagtcccgcaacgagcgcaacccttgctattagttgctacgcaagagcactctaataggactgccgttgacaaaacggaggaaggtggggacgacgtcaaatcatcatgccccttatgacctgggctacacacgtactacaatggacataaacagagggaagcaatacagtgatgtggagcaaacccctaaaaatgttctcagttcagattgcaggctgcaacccgcctgtatgaagatggaattgctagtaatcgcagatcagcatgctgcggtgaatacgttcccgggccttgtacacaccgcccgtcacaccatgggagccggtaatacccgaagtcagtagtctaaccgcaaggaggacgctgccgaaggtaggattggcgactggggtgaagtcgtaacaaggtagccgtatcggaaggtgcggctggatcacctcctt

SEQ ID NO: 380 - DNA, 1528 bp, artificial sequence
  SPC10470|FPCDEKLF_02436 16S ribosomal RNA
ttagagagtttgatcctggctcaggacgaacgctggcggcgtgcctaacacatgcaagtcgaacggaacttctttaaaggatttcttcggaatgaatttgattaagtttagtggcggacgggtgagtaacgcgtgagtaacctgcctctgagaggggaataacattctgaaaagaatgctaataccgcataacatatatttatcgcatggtagatatatcaaagatttatcgcttagagatggactcgcgtccgattagttagttggtgaggtaacggctcaccaagaccgcgatcggtagccggactgagaggttgaacggccacattgggactgagacacggcccagactcctacgggaggcagcagtgggggatattgcgcaatgggggaaaccctgacgcagcaacgccgcgtgaaggatgaaggtcttcggattgtaaacttcttttattaaggacgaagaaagtgacggtacttaatgaataagctccggctaactacgtgccagcagccgcggtaatacgtagggagcaagcgttgtccggatttactgggtgtaaagggtgcgtaggcggctttgcaagtcagatgtgaaatctatgggctcaacccatagcctgcatttgaaactgcagagcttgagtgaagtagaggcaggcggaattccccgtgtagcggtgaaatgcgtagagatggggaggaacaccagtggcgaaggcggcctgctgggctttaactgacgctgaggcacgaaagcgtgggtagcaaacaggattagataccctggtagtccacgctgtaaacgatgattactaggtgtggggggtctgaccccttccgtgccggagttaacacaataagtaatccacctggggagtacggccgcaaggttgaaactcaaaggaattgacgggggcccgcacaagcagtggagtatgtggtttaattcgaagcaacgcgaagaaccttaccaggtcttgacatcctactaacgagatagagatatgttaggtgcccttcggggaaagtagagacaggtggtgcatggttgtcgtcagctcgtgtcgtgagatgttgggttaagtcccgcaacgagcgcaacccttgctattagttgctacgcaagagcactctaataggactgccgttgacaaaacggaggaaggtggggacgacgtcaaatcatcatgccccttatgacctgggctacacacgtactacaatggatattaacagagggaagcaatacagtgatgtggagcaaacccctaaaaatgttctcagttcagattgcaggctgcaacccgcctgtatgaagatggaattgctagtaatcgcagatcagcatgctgcggtgaatacgttcccgggccttgtacacaccgcccgtcacaccatgggagccggtaatacccgaagtcagtagtctaaccgcaaggaggacgctgccgaaggtaggattggcgactggggtgaagtcgtaacaaggtagccgtatcggaaggtgcggctggatcacctcctt

SEQ ID NO: 381 - DNA, 1530 bp, artificial sequence
  GCA_900066615|JJEECKEO_00315 16S ribosomal RNA
tatgagagtttgatcctggctcaggatgaacgctggcggcgtgcttaacacatgcaagtcgagcgaagcactctgctttgattctttcgggatgaagagcattgtgactgagcggcggacgggtgagtaacgcgtgggtaacctgcctcatacagggggataacagttagaaatggctgctaataccgcataagaccacagcaccgcatggtgcaggggtaaaaactccggtggtatgagatggacccgcgtctgattagctagttggtggggtaacggcctaccaaggcgacgatcagtagccgacctgagagggtgaccggccacattgggactgagacacggcccaaactcctacgggaggcagcagtggggaatattgcacaatgggggaaaccctgatgcagcgacgccgcgtgagcgaagaagtatttcggtatgtaaagctctatcagcagggaagaaaatgacggtacctgactaagaagccccggctaactacgtgccagcagccgcggtaatacgtagggggcaagcgttatccggatttactgggtgtaaagggagcgtagacggcgaggcaagtctgatgtgaaaacccggggctcaaccccgtgactgcattggaaactgttttgcttgagtgccggagaggtaagcggaattcctagtgtagcggtgaaatgcgtagatattaggaggaacaccagtggcgaaggcggcttactggacggcaactgacgttgaggctcgaaagcgtggggagcaaacaggattagataccctggtagtccacgccgtaaacgatgaatactaggtgtcggggagcaaagctcttcggtgccgccgcaaacgcaataagtattccacctggggagtacgttcgcaagaatgaaactcaaaggaattgacggggacccgcacaagcggtggagcatgtggtttaattcgaagcaacgcgaagaaccttaccaagccttgacatcccattgacagagcatgtaatgtgctttcccttcggggcagtggtgacaggtggtgcatggttgtcgtcagctcgtgtcgtgagatgttgggttaagtcccgcaacgagcgcaacccctatcttcagtagccagcggttcggccgggcactctggagagactgccagggataacctggaggaaggtggggatgacgtcaaatcatcatgccccttatggcttgggctacacacgtgctacaatggcgtaaacaaagggaagcgagcctgcgagggggagcaaatcccaaaaataacgtctcagttcggattgtagtctgcaactcgactacatgaagctggaatcgctagtaatcgcgaatcagaatgtcgcggtgaatacgttcccgggtcttgtacacaccgcccgtcacaccatgggagtcggcaacgcccgaagccagtgacccaaccgaaaggagggagctgtcgaaggcggggccggtaactggggtgaagtcgtaacaaggtagccgtatcggaaggtgcggctggatcacctccttt

SEQ ID NO: 382 - DNA, 1511 bp, artificial sequence
  GCA_900067025|EGKPLLKC_05280 16S ribosomal RNA
attaagagtttgatcctggctcaggacgaacgctggcggcacgcttaacacatgcaagtcgaacgagagaagagaagcttgcttttctgatctagtggcggacgggtgagtaacacgtgagcaatctgcctttcagagggggataccgattggaaacgatcgttaataccgcataacataattgaaccgcatgatttgattatcaaagatttatcgctgaaagatgagctcgcgtctgattagctagttggtaaggtaacggcttaccaaggcgacgatcagtagccggactgagaggttgatcggccacattgggactgagacacggcccagactcctacgggaggcagcagtggggaatattgcacaatggaggaaactctgatgcagcgatgccgcgtgagggaagaaggttttaggattgtaaacctctgtcttcagggacgaaaaaaaagacggtacctgaggaggaagctccggctaactacgtgccagcagccgcggtaatacgtagggagcgagcgttgtccggaattactgggtgtaaagggagcgtaggcgggatcgcaagtcagatgtgaaaactatgggcttaacccataaactgcatttgaaactgtggttcttgagtgaagtagaggtaagcggaattcctagtgtagcggtgaaatgcgtagatattaggaggaacatcagtggcgaaggcggcttactgggctttaactgacgctgaggctcgaaagcgtggggagcaaacaggattagataccctggtagtccacgccgtaaacgatgattactaggtgtggggggactgaccccttccgtgccgcagcaaacgcaataagtaatccacctggggagtacgaccgcaaggttgaaactcaaaggaattgacgggggcccgcacaagcagtggagtatgtggattaattcgaagcaacgcgaagaaccttaccaggtcttgacatcgtatgcatagctcagagatgagtgaaatctcttcggagacatatagacaggtggtgcatggttgtcgtcagctcgtgtcgtgagatgttgggttaagtcccgcaacgagcgcaacccttactgttagttgctacgcaagagcactctagcaggactgccgttgacaaaacggaggaaggtggggatgacgtcaaatcatcatgccccttatgacctgggcctcacacgtactacaatggctgtcaacagagggatgcaaagccgcgaggtggagcgaacccctaaaagcagtcttagttcggattgtaggctgcaacccgcctacatgaagtcggaattgctagtaatcgcagatcagcatgctgcggtgaatacgttcccgggccttgtacacaccgcccgtcacgccatgggagtcggtaacacccgaagcctgtagtctaaccgcaaggaggacgcagtcgaaggtgggattgatgactggggtgaagtcgtaacaaggtagccgtatcggaaggtgcggctggatcacctccttt

SEQ ID NO: 383 - DNA, 1312 bp, artificial sequence
  GCF_000209875|FPCKKGIF_00294 16S ribosomal RNA
atatcaaagattttatcgcttgaagatggactcgcgtccgattagttagttggtgaggtaacggctcaccaagaccgcgatcggtagccggactgagaggttgaacggccacattgggactgagacacggcccagactcctacgggaggcagcagtgggggatattgcgcaatgggggcaaccctgacgcagcaacgccgcgtgaaggatgaaggttttcggattgtaaacttcttttattaaggacgaaacttgacggtacttaatgaataagctccggctaactacgtgccagcagccgcggtaatacgtagggagcaagcgttgtccggatttactgggtgtaaagggtgcgtaggcggctttgcaagtcagatgtgaaatctatgggctcaacccataaactgcatttgaaactgtagagcttgagtgaagtagaggcaggcggaattccccgtgtagcggtgaaatgcgtagagatggggaggaacaccagtggcgaaggcggcctgctgggctttaactgacgctgaggcacgaaagcgtgggtagcaaacaggattagataccctggtagtccacgctgtaaacgatgattactaggtgtggggggtctgaccccttccgtgccggagttaacacaataagtaatccacctggggagtacggccgcaaggttgaaactcaaaggaattgacgggggcccgcacaagcagtggagtatgtggtttaattcgaagcaacgcgaagaaccttaccaggtcttgacatccaactaacgaagtagagatacattaggtgcccttcggggaaagttgagacaggtggtgcatggttgtcgtcagctcgtgtcgtgagatgttgggttaagtcccgcaacgagcgcaacccttgctattagttgctacgcaagagcactctaataggactgccgttgacaaaacggaggaaggtggggacgacgtcaaatcatcatgccccttatgacctgggctacacacgtactacaatggatgttaacagagggaagcaagacagcgatgtggagcaaacccctaaaaacattctcagttcagattgcaggctgcaacccgcctgcatgaagatggaattgctagtaatcgcggatcagcatgccgcggtgaatacgttcccgggccttgtacacaccgcccgtcacaccatgggagccggtaatacccgaagtcagtagtccaacctcgtgaggacgctgccgaaggtaggattggcgactggggtgaagtcgtaacaaggtagccgtatcggaaggtgcggctggatcacctccttt

SEQ ID NO: 384 - DNA, 1528 bp, artificial sequence; identical to SEQ ID NO: 77
  GCF_000507805|ONIFJNBG_02190 16S ribosomal RNA

SEQ ID NO: 385 - DNA, 1528 bp, artificial sequence; identical to SEQ ID NO: 78
  GCF_000507805|ONIFJNBG_02411 16S ribosomal RNA

SEQ ID NO: 386 - DNA, 1528 bp, artificial sequence; identical to SEQ ID NO: 79
  GCF_000507805|ONIFJNBG_02808 16S ribosomal RNA

SEQ ID NO: 387 - DNA, 1242 bp, artificial sequence; identical to SEQ ID NO: 80
  GCF_000507805|ONIFJNBG_02871 16S ribosomal RNA (partial)
  misc_feature (1)..(1): n is a, c, g, or t

SEQ ID NO: 388 - DNA, 1528 bp, artificial sequence; identical to SEQ ID NO: 81
  GCF_000507805|ONIFJNBG_03037 16S ribosomal RNA

SEQ ID NO: 389 - DNA, 1527 bp, artificial sequence
  GCF_000153905|DFNHJFHB_00540 16S ribosomal RNA
tcagagagtttgatcctggctcaggatgaacgctggcggcgtgcttaacacatgcaagtcgaacgggaaacttttcattgaagcttcggcagatttggtctgtttctagtggcggacgggtgagtaacgcgtgggtaacctgccttatacagggggataacaaccagaaatggttgctaataccgcataagcgcacaggaccgcatggtccggtgtgaaaaactccggtggtataagatggacccgcgttggattagctagttggcagggtaacggcctaccaaggcgacgatccatagccggcctgagagggtgaacggccacattgggactgagacacggcccagactcctacgggaggcagcagtggggaatattgcacaatgggggaaaccctgatgcagcgacgccgcgtgaaggaagaagtatctcggtatgtaaacttctatcagcagggaagatagtgacggtacctgactaagaagccccggctaactacgtgccagcagccgcggtaatacgtagggggcaagcgttatccggatttactgggtgtaaagggagcgtagacggactggcaagtctgatgtgaaaggcgggggctcaacccctggactgcattggaaactgttagtcttgagtgccggagaggtaagcggaattcctagtgtagcggtgaaatgcgtagatattaggaggaacaccagtggcgaaggcggcttactggacggtaactgacgttgaggctcgaaagcgtggggagcaaacaggattagataccctggtagtccacgccgtaaacgatgaatactaggtgttggggagcaaagctcttcggtgccgccgcaaacgcattaagtattccacctggggagtacgttcgcaagaatgaaactcaaaggaattgacggggacccgcacaagcggtggagcatgtggtttaattcgaagcaacgcgaagaaccttaccaagtcttgacatccctctgaccgttccttaaccggaactttccttcgggacagaggagacaggtggtgcatggttgtcgtcagctcgtgtcgtgagatgttgggttaagtcccgcaacgagcgcaacccctatccccagtagccagcggttcggccgggcactctgaggagactgccagggataacctggaggaaggcggggatgacgtcaaatcatcatgccccttatgatttgggctacacacgtgctacaatggcgtaaacaaagggaagcgagcctgcgaaggtaagcaaatcccaaaaataacgtcccagttcggactgcagtctgcaactcgactgcacgaagctggaatcgctagtaatcgcggatcagaatgccgcggtgaatacgttcccgggtcttgtacacaccgcccgtcacaccatgggagtcagtaacgcccgaagtcagtgacctaactgcaaagaaggagctgccgaaggcgggaccgatgactggggtgaagtcgtaacaaggtagccgtatcggaaggtgcggctggatcacctccttt

SEQ ID NO: 390 - DNA, 1527 bp, artificial sequence
  GCF_000153905|DFNHJFHB_02504 16S ribosomal RNA
tcagagagtttgatcctggctcaggatgaacgctggcggcgtgcttaacacatgcaagtcgaacgggaaacttttcattgaagcttcggcagatttggtctgtttctagtggcggacgggtgagtaacgcgtgggtaacctgccttatacagggggataacaaccagaaatggttgctaataccgcataagcgcacaggaccgcatggtctagtgtgaaaaactccggtggtataagatggacccgcgttggattagctagttggcagggtaacggcctaccaaggcgacgatccatagccggcctgagagggtgaacggccacattgggactgagacacggcccagactcctacgggaggcagcagtggggaatattgcacaatgggggaaaccctgatgcagcgacgccgcgtgaaggaagaagtatctcggtatgtaaacttctatcagcagggaagatagtgacggtacctgactaagaagccccggctaactacgtgccagcagccgcggtaatacgtagggggcaagcgttatccggatttactgggtgtaaagggagcgtagacggactggcaagtctgatgtgaaaggcgggggctcaacccctggactgcattggaaactgttagtcttgagtgccggagaggtaagcggaattcctagtgtagcggtgaaatgcgtagatattaggaggaacaccagtggcgaaggcggcttactggacggtaactgacgttgaggctcgaaagcgtggggagcaaacaggattagataccctggtagtccacgccgtaaacgatgaatactaggtgttggggagcaaagctcttcggtgccgccgcaaacgcattaagtattccacctggggagtacgttcgcaagaatgaaactcaaaggaattgacggggacccgcacaagcggtggagcatgtggtttaattcgaagcaacgcgaagaaccttaccaagtcttgacatccctctgaccgttccttaaccggaactttccttcgggacaggggagacaggtggtgcatggttgtcgtcagctcgtgtcgtgagatgttgggttaagtcccgcaacgagcgcaacccctatccccagtagccagcagtccggctgggcactctgaggagactgccagggataacctggaggaaggcggggatgacgtcaaatcatcatgccccttatgatttgggctacacacgtgctacaatggcgtaaacaaagggaagcaagcctgcgaaggtaagcaaatcccaaaaataacgtcccagttcggactgcagtctgcaactcgactgcacgaagctggaatcgctagtaatcgcggatcagaatgccgcggtgaatacgttcccgggtcttgtacacaccgcccgtcacaccatgggagtcagtaacgcccgaagtcagtgacctaactgcaaagaaggagctgccgaaggcgggaccgatgactggggtgaagtcgtaacaaggtagccgtatcggaaggtgcggctggatcacctccttt

SEQ ID NO: 391 - DNA, 1177 bp, artificial sequence
  SPC10820|DLMKICIM_03226 16S ribosomal RNA (partial)
cctacgggaggcagcagtggggaatattgcacaatgggggaaaccctgatgcagcgacgccgcgtgaaggaagaagtatctcggtatgtaaacttctatcagcagggaagatagtgacggtacctgactaagaagccccggctaactacgtgccagcagccgcggtaatacgtagggggcaagcgttatccggatttactgggtgtaaagggagcgtagacggactggcaagtctgatgtgaaaggcgggggctcaacccctggactgcattggaaactgttagtcttgagtgccggagaggtaagcggaattcctagtgtagcggtgaaatgcgtagatattaggaggaacaccagtggcgaaggcggcttactggacggtaactgacgttgaggctcgaaagcgtggggagcaaacaggattagataccctggtagtccacgccgtaaacgatgaatactaggtgttggggagcaaagctcttcggtgccgccgcaaacgcattaagtattccacctggggagtacgttcgcaagaatgaaactcaaaggaattgacggggacccgcacaagcggtggagcatgtggtttaattcgaagcaacgcgaagaaccttaccaagtcttgacatccctctgaccgactcttaaccgagtctttccttcgggacagaggagacaggtggtgcatggttgtcgtcagctcgtgtcgtgagatgttgggttaagtcccgcaacgagcgcaacccctatccccagtagccagcggttcggccgggcactctgaggagactgccagggataacctggaggaaggcggggatgacgtcaaatcatcatgccccttatgatttgggctacacacgtgctacaatggcgtaaacaaagggaagcaagcctgcgaaggtaagcaaatcccaaaaataacgtcccagttcggactgcagtctgcaactcgactgcacgaagctggaatcgctagtaatcgcggatcagaatgccgcggtgaatacgttcccgggtcttgtacacaccgcccgtcacaccatgggagtcagtaacgcccgaagtcagtgacctaaccgcaagggaggagctgccgaaggcgggaccgatgactggggtgaagtcgtaacaaggtagccgtatcggaaggtgcggctggatcacctccttt

SEQ ID NO: 392 - DNA, 1529 bp, artificial sequence
  GCF_000153925|COOEMKBM_00189 16S ribosomal RNA
aacgagagtttgatcctggctcaggatgaacgctggcggcgtgcctaacacatgcaagtcgagcgaagcactttgcttagattcttcggatgaagaggattgtgactgagcggcggacgggtgagtaacgcgtgggtaacctgcctcatacagggggataacagttagaaatgactgctaataccgcataagaccacagcaccgcatggtgcgggggtaaaaactccggtggtatgagatggacccgcgtctgattagctagttggtaaggtaacggcttaccaaggcgacgatcagtagccgacctgagagggtggccggccacattgggactgagacacggcccaaactcctacgggaggcagcagtggggaatattgcacaatgggggaaaccctgatgcagcgacgccgcgtgagcgaagaagtatttcggtatgtaaagctctatcagcagggaagaaaatgacggtacctgactaagaagcaccggctaaatacgtgccagcagccgcggtaatacgtatggtgcaagcgttatccggatttactgggtgtaaagggagcgtagacggatgggcaagtctgatgtgaaaacccggggctcaaccccgggactgcattggaaactgttcatctagagtgctggagaggtaagtggaattcctagtgtagcggtgaaatgcgtagatattaggaggaacaccagtggcgaaggcggcttactggacagtaactgacgttgaggctcgaaagcgtggggagcaaacaggattagataccctggtagtccacgccgtaaacgatgactactaggtgtcgggtggcaaagccattcggtgccgcagcaaacgcaataagtagtccacctggggagtacgttcgcaagaatgaaactcaaaggaattgacggggacccgcacaagcggtggagcatgtggtttaattcgaagcaacgcgaagaaccttacctgctcttgacatcccgctgaccggacggtaatgcgtccttcccttcggggcagcggagacaggtggtgcatggttgtcgtcagctcgtgtcgtgagatgttgggttaagtcccgcaacgagcgcaacccctatctttagtagccagcggccaggccgggcactctagagagactgccggggataacccggaggaaggtggggatgacgtcaaatcatcatgccccttatgagcagggctacacacgtgctacaatggcgtaaacaaagggaagcgagaccgcgaggtggagcaaatcccaaaaataacgtctcagttcggattgtagtctgcaactcgactacatgaagctggaatcgctagtaatcgcgaatcagaatgtcgcggtgaatacgttcccgggtcttgtacacaccgcccgtcacaccatgggagtcagtaacgcccgaagtcagtgacccaaccgtaaggagggagctgccgaaggcgggaccgataactgggggtgaagtcgtaacaaggtagccgtatcggaaggtgcggctggatcacctccttt

SEQ ID NO: 393 - DNA, 1529 bp, artificial sequence
  GCF_000153925|COOEMKBM_01225 16S ribosomal RNA
aacgagagtttgatcctggctcaggatgaacgctggcggcgtgcctaacacatgcaagtcgagcgaagcactttgcttagattcttcggatgaagaggattgtgactgagcggcggacgggtgagtaacgcgtgggtaacctgcctcatacagggggataacagttagaaatgactgctaataccgcataagaccacagcaccgcatggtgcgggggtaaaaactccggtggtatgagatggacccgcgtctgattagctagttggtaaggtaacggcttaccaaggcgacgatcagtagccgacctgagagggtgaccggccacattgggactgagacacggcccaaactcctacgggaggcagcagtggggaatattgcacaatgggggaaaccctgatgcagcgacgccgcgtgagcgaagaagtatttcggtatgtaaagctctatcagcagggaagaaaatgacggtacctgactaagaagcaccggctaaatacgtgccagcagccgcggtaatacgtatggtgcaagcgttatccggatttactgggtgtaaagggagcgtagacggatgggcaagtctgatgtgaaaacccggggctcaaccccgggactgcattggaaactgttcatctagagtgctggagaggtaagtggaattcctagtgtagcggtgaaatgcgtagatattaggaggaacaccagtggcgaaggcggcttactggacagtaactgacgttgaggctcgaaagcgtggggagcaaacaggattagataccctggtagtccacgccgtaaacgatgactactaggtgtcgggtggcaaagccattcggtgccgcagcaaacgcaataagtagtccacctggggagtacgttcgcaagaatgaaactcaaaggaattgacggggacccgcacaagcggtggagcatgtggtttaattcgaagcaacgcgaagaaccttacctgctcttgacatcccgctgaccggacggtaatgcgtccttcccttcggggcagcggagacaggtggtgcatggttgtcgtcagctcgtgtcgtgagatgttgggttaagtccccgcaacgagcgcaacccctatctttagtagccagcggccaggccgggcactctagagagactgccggggataacccggaggaaggtggggatgacgtcaaatcatcatgccccttatgagcagggctacacacgtgctacaatggcgtaaacaaagggaagcgagaccgcgaggtggagcaaatcccaaaaataacgtctcagttcggattgtagtctgcaactcgactacatgaagctggaatcgctagtaatcgcgaatcagaatgtcgcggtgaatacgttcccgggtcttgtacacaccgcccgtcacaccatgggagtcagtaacgcccgaagtcagtgacccaaccgtaaggagggagctgccgaaggcgggaccgataactggggtgaagtcgtaacaaggtagccgtatcggaaggtgcggctggatcacctccttt

SEQ ID NO: 394 - DNA, 1056 bp, artificial sequence
  GCF_000153925|COOEMKBM_01235 16S ribosomal RNA (partial)
aacgagagtttgatcctggctcaggatgaacgctggcggcgtgcctaacacatgcaagtcgagcgaagcactttgcttagattcttcggatgaagaggattgtgactgagcggcggacgggtgagtaacgcgtgggtaacctgcctcatacagggggataacagttagaaatgactgctaataccgcataagaccacagcaccgcatggtgcgggggtaaaaactccggtggtatgagatggacccgcgtctgattagctagttggtaaggtaacggcttaccaaggcgacgatcagtagccgacctgagagggtgaccggccacattgggactgagacacggcccaaactcctacgggaggcagcagtggggaatattgcacaatgggggaaaccctgatgcagcgacgccgcgtgagcgaagaagtatttcggtatgtaaagctctatcagcagggaagaaaatgacggtacctgactaagaagcaccggctaaatacgtgccagcagccgcggtaatacgtatggtgcaagcgttatccggatttactgggtgtaaagggagcgtagacggatgggcaagtctgatgtgaaaacccggggctcaaccccgggactgcattggaaactgttcatctagagtgctggagaggtaagtggaattcctagtgtagcggtgaaatgcgtagatattaggaggaacaccagtggcgaaggcggcttactggacagtaactgacgttgaggctcgaaagcgtggggagcaaacaggattagataccctggtagtccacgccgtaaacgatgactactaggtgtcgggtggcaaagccattcggtgccgcagcaaacgcaataagtagtccacctggggagtacgttcgcaagaatgaaactcaaaggaattgacggggacccgcacaagcggtgggagcatgtggtttaattcgaagcaacgcgaagaaccttacctgctcttgacatcccgctgaccggacggtaatgcgtccttcccttcgggcagcggagacaggtggtgcatggttgtcgtcagct

SEQ ID NO: 395 - DNA, 1529 bp, artificial sequence; identical to SEQ ID NO: 392
  GCF_000153925|COOEMKBM_01236 16S ribosomal RNA

SEQ ID NO: 396 - DNA, 1177 bp, artificial sequence
  GCF_000153925|COOEMKBM_01246 16S ribosomal RNA (partial)
aacgagagtttgatcctggctcaggatgaacgctggcggcgtgcctaacacatgcaagtcgagcgaagcactttgcttagattcttcggatgaagaggattgtgactgagcggcggacgggtgagtaacgcgtgggtaacctgcctcatacagggggataacagttagaaatgactgctaataccgcataagaccacagcaccgcatggtgcgggggtaaaaactccggtggtatgagatggacccgcgtctgattagctggttggtaaggtaacggcttaccaaggcgacgatcagtagccgacctgagagggtgaccggccacattgggactgagacacggcccaaactcctacgggaggcagcagtggggaatattgcacaatgggggaaaccctgatgcagcgacgccgcgtgagcgaagaagtatttcggtatgtaaagctctatcagcagggaagaaaatgacggtacctgactaagaagcaccggctaaatacgtgccagcagccgcggtaatacgtatggtgcaagcgttatccggatttactgggtgtaaagggagcgtagacggatgggcaagtctgatgtgaaaacccggggctcaaccccgggactgcattggaaactgttcatctagagtgctggagaggtaagtggaattcctagtgtagcggtgaaatgcgtagatattaggaggaacaccagtggcgaaggcggcttactggacagtaactgacgttgaggctcgaaagcgtggggagcaaacaggattagataccctggtagtccacgccgtaaacgatgactactaggtgtcgggtggcaaagccattcggtgccgcagcaaacgcaataagtagtccacctgggggagtacgttcgcaagaatgaaactcaaaggaattgacgggggacccgcacaagcggtggagcatgtggtttaattcgaagcaacgcgaagaaccttacctgctcttgacatcccgctgaccggacggtaatgcgtccttcccttcggggcagcggagacaggtggtgcatggttgtcgtcagctcgtgtcgtgagatgttgggttaagtcccgcacgagcgcaaccctatctttagtagcagcggccaggccgggcactctaaaagagactgccggggataatcccgggaggaaggtggggat

SEQ ID NO: 397 - DNA, 1528 bp, artificial sequence
  GCF_000153925|COOEMKBM_01507 16S ribosomal RNA
tacgagagtttgatcctggctcaggatgaacgcgggcggcgtgcctaacacatgcaagtcgagcgaagcactttgcttagattcttcggatgaagaggattgtgactgagcggcggacgggtgagtaacgcgtgggtaacctgcctcatacagggggataacagttagaaatgactgctaataccgcataagaccacagcaccgcatggtgcgggggtaaaaactccggtggtatgagatggacccgcgtctgattagctagttggtaaggtaacggcttaccaaggcgacgatcagtagccgacctgagagggtggccggccacattgggactgagacacggcccaaactcctacgggaggcagcagtggggaatattgcacaatgggggaaaccctgatgcagcgacgccgcgtgagcgaagaagtatttcggtatgtaaagctctatcagcagggaagaaaatgacggtacctgactaagaagcaccggctaaatacgtgccagcagccgcggtaatacgtatggtgcaagcgttatccggatttactgggtgtaaagggagcgtagacggatgggcaagtctgatgtgaaaacccggggctcaaccccgggactgcattggaaactgttcatctagagtgctggagaggtaagtggaattcctagtgtagcggtgaaatgcgtagatattaggaggaacaccagtggcgaaggcggcttactggacagtaactgacgttgaggctcgaaagcgtggggagcaaacaggattagataccctggtagtccacgccgtaaacgatgactactaggtgtcgggtggcaaagccattcggtgccgcagcaaacgcaataagtagtccacctggggagtacgttcgcaagaatgaaactcaaaggaattgacggggacccgcacaagcggtggagcatgtggtttaattcgaagcaacgcgaagaaccttacctgctcttgacatcccgctgaccggacggtaatgcgtccttcccttcggggcagcggagacaggtggtgcatggttgtcgtcagctcgtgtcgtgagatgttgggttaagtcccgcaacgagcgcaacccctatctttagtagccagcggccaggccgggcactctagagagactgccggggataacccggaggaaggtggggatgacgtcaaatcatcatgccccttatgagcagggctacacacgtgctacaatggcgtaaacaaagggaagcgagaccgcgaggtggagcaaatcccaaaaataacgtctcagttcggattgtagtctgcaactcgactacatgaagctggaatcgctagtaatcgcgaatcagaatgtcgcggtgaatacgttcccgggtcttgtacacaccgcccgtcacaccatgggagtcagtaacgcccgaagtcagtgacccaaccgtaaggagggagctgccgaaggcgggaccgataactggggtgaagtcgtaacaaggtagccgtatcggaaggtgcggctggatcacctccttt

SEQ ID NO: 398 - DNA, 1526 bp, artificial sequence
  GCF_000238635|HAPADMKB_02106 16S ribosomal RNA
aatgaagagtttgatcctggctcaggacgaacgctggcggcgcgcctaacacatgcaagtcgaacggagctgttttctctgaagttttcggatggaagagagttcagcttagtggcgaacgggtgagtaacacgtgagcaacctgcctttcagtgggggacaacatttggaaacgaatgctaataccgcataagaccacagtgtcgcatggcacaggggtcaaaggatttatccgctgaaagatgggctcgcgtccgattagctagatggtgaggtaacggcccaccatggcgacgatcggtagccggactgagaggttgaacggccacattgggactgagacacggcccagactcctacgggaggcagcagtggggaatattgcacaatgggggaaaccctgatgcagcgacgccgcgtggaggaagaaggtcttcggattgtaaactcctgtcccaggggacgataatgacggtaccctgggaggaagcaccggctaactacgtgccagcagccgcggtaaaacgtagggtgcaagcgttgtccggaattactgggtgtaaagggagcgcaggcggattggcaagttgggagtgaaatctatgggctcaacccataaattgctttcaaaactgtcagtcttgagtggtgtagaggtaggcggaattcccggtgtagcggtggaatgcgtagatatcgggaggaacaccagtggcgaaggcggcctactgggcactaactgacgctgaggctcgaaagcatgggtagcaaacaggattagataccctggtagtccatgccgtaaacgatgattactaggtgtgggaggattgaccccttccgtgccgcagttaacacaataagtaatccacctggggagtacgaccgcaaggttgaaactcaaaggaattgacgggggcccgcacaagcagtggagtatgtggtttaattcgaagcaacgcgaagaaccttaccaggtcttgacatcggatgcatacctaagagattagggaagtccttcgggacatccagacaggtggtgcatggttgtcgtcagctcgtgtcgtgagatgttgggttaagtcccgcaacgagcgcaacccttatcgttagttactacgcaagaggactctagcgagactgccgttgacaaaacggaggaaggtggggatgacgtcaaatcatcatgccctttatgacctgggctacacacgtactacaatggctattaacagagagaagcgataccgcgaggtggagcaaacctcacaaaaatagtctcagttcggatcgcaggctgcaacccgcctgcgtgaagccggaattgctagtaatcgcggatcagcatgccgcggtgaatacgttcccgggccttgtacacaccgcccgtcacaccatgagagccggggggacccgaagtcggtagtctaaccgcaaggaggacgccgccgaaggtaaaactggtgattggggtgaagtcgtaacaaggtagccgtatcggaaggtgcggctggatcacctccttt

What is claimed:

1. A composition comprising a first purified bacterial population and a second purified bacterial population,
wherein the first purified bacterial population comprises one or more bacteria having a 16S rDNA sequence that is at least 97%, at least 97.5%, at least 98%, at least 98.5%, at least 99%, at least 99.5%, or 100% identical to a 16S rDNA sequence set forth in SEQ ID NO: 215, SEQ ID NO: 112, SEQ ID NO: 113, SEQ ID NO: 114, SEQ ID NO: 115, SEQ ID NO: 116, SEQ ID NO: 188, SEQ ID NO: 212, SEQ ID NO: 160, SEQ ID NO: 186, SEQ ID NO: 203, SEQ ID NO: 104, SEQ ID NO: 208, SEQ ID NO: 189, SEQ ID NO: 187, SEQ ID NO: 207, SEQ ID NO: 190, SEQ ID NO: 191, SEQ ID NO: 211, SEQ ID NO: 209, SEQ ID NO: 110, SEQ ID NO: 150, SEQ ID NO: 175, SEQ ID NO: 158, SEQ ID NO: 210, or SEQ ID NO: 106, and
wherein the second purified bacterial population comprises one or more bacteria having one or more features selected from the group consisting of: (i) capable of engrafting when administered to a subject, (ii) capable of having anti-inflammatory activity, (iii) not capable of inducing pro-inflammatory activity, (iv) capable of producing a secondary bile acid, (v) capable of producing a tryptophan metabolite, (vi) capable of restoring epithelial integrity as determined by a primary epithelial cell monolayer barrier integrity assay, (vii) capable of being associated with remission of an inflammatory bowel disease, (viii) capable of producing a short-chain fatty acid, (ix) capable of inhibiting a HDAC activity, (x) capable of producing a middle-chain fatty acid, (xi) capable of expressing catalase activity, (xii) capable of having alpha-fucosidase activity, (xiii) capable of inducing Wnt activation, (xiv) capable of producing a B vitamin, (xv) capable of modulating host metabolism of endocannabinoid, (xvi) capable of producing a polyamine and/or modulating a host metabolism of a polyamine, (xvii) capable of reducing fecal levels of a sphingolipid, (xviii) capable of modulating host production of kynurenine, (xix) capable of reducing fecal calprotectin level, (xx) not capable of activating a toll-like receptor pathway (e.g., TLR2 or TLR5), (xxi) capable of activating a toll-like receptor pathway (e.g., TLR2 or TLR5), and (xxii) any combination thereof.

2. A composition comprising a first purified bacterial population and a second purified bacterial population,
wherein the first bacterial population comprises one or more bacteria having a 16S rDNA sequence that is at least 97%, at least 97.5%, at least 98%, at least 98.5%, at least 99%, at least 99.5% or 100% identical to a 16S rDNA sequence set forth in SEQ ID NO: 118, SEQ ID NO: 166, SEQ ID NO: 167, SEQ ID NO: 168, SEQ ID NO: 169, SEQ ID NO: 176, SEQ ID NO: 177, SEQ ID NO: 178, or SEQ ID NO: 137, and
wherein the second purified bacterial population comprises one or more bacteria having one or more features selected from the group consisting of: (i) capable of engrafting when administered to a subject, (ii) capable of having anti-inflammatory activity, (iii) not capable of inducing pro-inflammatory activity, (iv) capable of producing a secondary bile acid, (v) capable of producing a tryptophan metabolite, (vi) capable of restoring epithelial integrity as determined by a primary epithelial cell monolayer barrier integrity assay, (vii) capable of being associated with remission of an inflammatory bowel disease, (viii) capable of producing a short-chain fatty acid, (ix) capable of inhibiting a HDAC activity, (x) capable of producing a middle-chain fatty acid, (xi) capable of expressing catalase activity, (xii) capable of having alpha-fucosidase activity, (xiii) capable of inducing Wnt activation, (xiv) capable of producing a B vitamin, (xv) capable of modulating host metabolism of endocannabinoid, (xvi) capable of producing a polyamine and/or modulating a host metabolism of a polyamine, (xvii) capable of reducing fecal levels of a sphingolipid, (xviii) capable of modulating host production of kynurenine, (xix) capable of reducing fecal calprotectin level, (xx) not capable of activating a toll-like receptor pathway (e.g., TLR4 or TLR5), (xxi) capable of activating a toll-like receptor pathway (e.g., TLR2), and (xxii) any combination thereof.

3. A composition comprising a first purified bacterial population and a second purified bacterial population,
wherein the first bacterial population comprises one or more bacteria having a 16S rDNA sequence that is at least 97%, at least 97.5%, at least 98%, at least 98.5%, at least 99%, at least 99.5%, or 100% identical to a 16S rDNA sequence set forth in SEQ ID NO: 117, SEQ ID NO: 137, SEQ ID NO: 111, or SEQ ID NO: 103, and
wherein the second purified bacterial population comprises one or more bacteria having one or more features selected from the group consisting of: (i) capable of engrafting when administered to a subject, (ii) capable of having anti-inflammatory activity, (iii) not capable of inducing pro-inflammatory activity, (iv) capable of producing a secondary bile acid, (v) capable of producing a tryptophan metabolite, (vi) capable of restoring epithelial integrity as determined by a primary epithelial cell monolayer barrier integrity assay, (vii) capable of being associated with remission of an inflammatory bowel disease, (viii) capable of producing a short-chain fatty acid, (ix) capable of inhibiting a HDAC activity, (x) capable of producing a middle-chain fatty acid, (xi) capable of expressing catalase activity, (xii) capable of having alpha-fucosidase activity, (xiii) capable of inducing Wnt activation, (xiv) capable of producing a B vitamin, (xv) capable of modulating host metabolism of endocannabinoid, (xvi) capable of producing a polyamine and/or modulating host metabolism of a polyamine, (xvii) capable of producing a sphingolipid, (xviii) capable of modulating host production of kynurenine, (xix) capable of reducing fecal calprotectin level, (xx) not capable of activating a toll-like receptor pathway (e.g., TLR2 or TLR5), (xxi) capable of activating a toll-like receptor pathway (e.g., TLR2 or TLR5), and (xxii) any combination thereof.

4. The composition of any one of claims 1 to 3, wherein the one or more features are selected from (i) capable of engrafting when administered to a subject; (ii) capable of having anti-inflammatory activity, (iii) not capable of inducing pro-inflammatory activity, (iv) capable of producing a secondary bile acid, (v) capable of producing a tryptophan metabolite, (vi) capable of restoring epithelial integrity as determined by a primary epithelial cell monolayer barrier integrity assay, (vii) capable of being associated with remission of an inflammatory bowel disease, (viii) capable of producing a short-chain fatty acid, (ix) capable of inhibiting a HDAC activity, (x) capable of producing a middle-chain fatty acid, or (xi) any combination thereof.

5. The composition of any one of claims 1 to 4, wherein the second purified bacterial population comprises a long-term engrafter and/or a transient engrafter.

6. The composition of claim 5, wherein the second purified bacterial population comprises two, three, four, five, six, seven or more long-term engrafters.

7. The composition of claim 5 or 6, wherein the second purified bacterial population comprises two, three or more transient engrafters.

8. The composition of any one of claims 5 to 7, wherein a combination of the first purified bacterial population and the second purified bacterial population comprises three or more transient engrafters and/or seven or more long-term engrafters.

9. The composition of any one of claims 1 to 8, wherein the second purified bacterial population comprises one or more bacteria that are capable of producing a tryptophan metabolite.

10. The composition of any one of claims 1 to 9, wherein the second purified bacterial population comprises one or more bacteria that are capable of producing a secondary bile acid.

11. The composition of any one of claims 1 to 10, wherein the second purified bacterial population comprises one or more bacteria that are capable of having anti-inflammatory activity.

12. The composition of any one of claims 1 to 11, wherein the second purified bacterial population comprises one or more bacteria that are not capable of inducing pro-inflammatory activity.

13. The composition of any one of claims 1 to 12, wherein the second purified bacterial population comprises one or more bacteria that are capable of producing a short-chain fatty acid.

14. The composition of any one of claims 1 to 13, wherein the second purified bacterial population comprises one or more bacteria that are capable of producing a medium-chain fatty acid.

15. The composition of any one of claims 1 to 14, wherein the second purified bacterial population comprises one or more bacteria that are capable of inhibiting HDAC activity.

16. A composition comprising a purified bacterial population, wherein the purified bacterial population comprises two or more features selected from the group consisting of: (i) capable of engrafting when administered to a subject, (ii) capable of having anti-inflammatory activity, (iii) not capable of inducing pro-inflammatory activity, (iv) capable of producing a secondary bile acid, (v) capable of producing a tryptophan metabolite, (vi) capable of restoring epithelial integrity as determined by a primary epithelial cell monolayer barrier integrity assay, (vii) capable of being associated with remission of an inflammatory bowel disease, (viii) capable of producing a short-chain fatty acid, (ix) capable of inhibiting a HDAC activity, (x) capable of producing a middle-chain fatty acid, (xi) capable of expressing catalase activity, (xii) capable of having alpha-fucosidase activity, (xiii) capable of inducing Wnt activation, (xiv) capable of producing a B vitamin, (xv) capable of modulating host metabolism of endocannabinoid, (xvi) capable of producing a polyamine and/or modulating a host metabolism of a polyamine, (xvii) capable of reducing fecal levels of a sphingolipid, (xviii) capable of modulating host production of kynurenine, (xix) capable of reducing fecal calprotectin level, (xx) not capable of activating a toll-like receptor pathway (e.g., TLR2 or TLR5), (xxi) capable of activating a toll-like receptor pathway (e.g., TLR2 or TLR5), and (xxii) any combination thereof.

17. The composition of claim 16, wherein the two or more features are selected from (i) capable of engrafting when administered to a subject; (ii) capable of having anti-inflammatory activity, (iii) not capable of inducing pro-inflammatory activity, (iv) capable of producing a secondary bile acid, (v) capable of producing a tryptophan metabolite, (vi) capable of restoring epithelial integrity as determined by a primary epithelial cell monolayer barrier integrity assay, (vii) capable of being associated with remission of an inflammatory bowel disease, (viii) capable of producing a short-chain fatty acid, (ix) capable of inhibiting a HDAC activity, (x) capable of producing a middle-chain fatty acid, or (xi) any combination thereof.

18. The composition of claim 16 or 17, wherein the purified bacterial population comprises one or more bacteria having a 16S rDNA sequence that is at least 97%, at least 97.5%, at least 98%, at least 98.5%, at least 99%, at least 99.5%, or 100% identical to a 16S rDNA sequence set forth in SEQ ID NO: 215, SEQ ID NO: 112, SEQ ID NO: 113, SEQ ID NO: 114, SEQ ID NO: 115, SEQ ID NO: 116, SEQ ID NO: 188, SEQ ID NO: 212, SEQ ID NO: 160, SEQ ID NO: 186, SEQ ID NO: 203, SEQ ID NO: 104, SEQ ID NO: 208, SEQ ID NO: 189, SEQ ID NO: 187, SEQ ID NO: 207, SEQ ID NO: 190, SEQ ID NO: 191, SEQ ID NO: 211, SEQ ID NO: 209, SEQ ID NO: 110, SEQ ID NO: 159, SEQ ID NO: 175, SEQ ID NO: 158, SEQ ID NO: 210, or SEQ ID NO: 106.

19. The composition of any one of claims 16 to 18, wherein the purified bacterial population comprises one or more bacteria having a 16S rDNA sequence that is at least 97%, at least 97.5%, at least 98%, at least 98.5%, at least 99%, at least 99.5%, or 100% identical to a 16S rDNA sequence set forth in SEQ ID NO: 185, SEQ ID NO: 183, SEQ ID NO: 161, SEQ ID NO: 206, SEQ ID NO: 102, SEQ ID NO: 214, SEQ ID NO: 184, SEQ ID NO: 204, SEQ ID NO: 216, SEQ ID NO: 217, SEQ ID NO: 218, SEQ ID NO: 219, SEQ ID NO: 220, SEQ ID NO: 221, SEQ ID NO: 222, SEQ ID NO: 223, SEQ ID NO: 224, SEQ ID NO: 225, SEQ ID NO: 226, SEQ ID NO: 227, SEQ ID NO: 166, SEQ ID NO: 167, SEQ ID NO: 168, SEQ ID NO: 169, SEQ ID NO: 109, SEQ ID NO: 138, SEQ ID NO: 139, SEQ ID NO: 140, SEQ ID NO: 141, SEQ ID NO: 142, SEQ ID NO: 143, SEQ ID NO: 144, SEQ ID NO: 145, SEQ ID NO: 146, SEQ ID NO: 147, SEQ ID NO: 192, SEQ ID NO: 176, SEQ ID NO: 177, SEQ ID NO: 178, SEQ ID NO: 107, SEQ ID NO: 137, SEQ ID NO: 198, SEQ ID NO: 199, SEQ ID NO: 200, SEQ ID NO: 201, SEQ ID NO: 202, SEQ ID NO: 133, SEQ ID NO: 193, SEQ ID NO: 194, SEQ ID NO: 195, SEQ ID NO: 196, SEQ ID NO: 197, SEQ ID NO: 126, SEQ ID NO: 127, SEQ ID NO: 103, SEQ ID NO: 108, SEQ ID NO: 124, SEQ ID NO: 165, SEQ ID NO: 136, SEQ ID NO: 125, SEQ ID NO: 111, SEQ ID NO: 164, SEQ ID NO: 205, SEQ ID NO: 128, SEQ ID NO: 129, SEQ ID NO: 130, SEQ ID NO: 131, SEQ ID NO: 132, SEQ ID NO: 162, SEQ ID NO: 117, SEQ ID NO: 118, SEQ ID NO: 105, SEQ ID NO: 119, SEQ ID NO: 120, SEQ ID NO: 121, SEQ ID NO: 122, SEQ ID NO: 123, SEQ ID NO: 170, SEQ ID NO: 171, SEQ ID NO: 172, SEQ ID NO: 173, SEQ ID NO: 174, SEQ ID NO: 163, SEQ ID NO: 182, SEQ ID NO: 135, SEQ ID NO: 134, SEQ ID NO: 179, SEQ ID NO: 180, SEQ ID NO: 181, or SEQ ID NO: 213.

20. A composition comprising a purified bacterial population, comprising two or more bacteria, wherein the two or more bacteria comprises a long-term engrafter and a transient engrafter.

21. The composition of claim 20, wherein the purified bacterial population further comprises one or more bacteria, which has one or more features selected from the group consisting of: (i) capable of engrafting when administered to a subject, (ii) capable of having anti-inflammatory activity, (iii) not capable of inducing pro-inflammatory activity, (iv) capable of producing a secondary bile acid, (v) capable of producing a tryptophan metabolite, (vi) capable of restoring epithelial integrity as determined by a primary epithelial cell monolayer barrier integrity assay, (vii) capable of being associated with remission of an inflammatory bowel disease, (viii) capable of producing a short-chain fatty acid, (ix) capable of inhibiting a HDAC activity, (x) capable of producing a middle-chain fatty acid, (xi) capable of expressing catalase activity, (xii) capable of having alpha-fucosidase activity, (xiii) capable of inducing Wnt activation, (xiv) capable of producing a B vitamin, (xv) capable of modulating host metabolism of endocannabinoid, (xvi) capable of producing a polyamine and/or modulating host metabolism of polyamines, (xvii) capable of reducing fecal levels of a sphingolipid, (xviii) capable of modulating host production of kynurenine, (xix) capable of reducing fecal calprotectin level, (xx) not capable of activating a toll-like receptor pathway (e.g., TLR2 or TLR5), (xxi) capable of activating a toll-like receptor pathway (e.g., TLR2 or TLR5), and (xxii) any combination thereof.

22. The composition of claim 21, wherein the one or more features are selected from (i) capable of engrafting when administered to a subject; (ii) capable of having anti-inflammatory activity, (iii) not capable of inducing pro-inflammatory activity, (iv) capable of producing a secondary bile acid, (v) capable of producing a tryptophan metabolite, (vi) capable of restoring epithelial integrity as determined by a primary epithelial cell monolayer barrier integrity assay, (vii) capable of being associated with remission of an inflammatory bowel disease, (viii) capable of producing a short-chain fatty acid, (ix) capable of inhibiting a HDAC activity, (x) capable of producing a middle-chain fatty acid, or (xi) any combination thereof.

23. The composition of any one of claims 16 to 22, wherein the purified bacterial population comprises two, three, four, five, six, seven or more long-term engrafters.

24. The composition of any one of claims 16 to 23, wherein the purified bacterial population comprises two, three, four, five, six, seven or more transient engrafters.

25. The composition of any one of claims 16 to 24, wherein the purified bacterial population comprises three or more transient engrafters and/or seven or more long-term engrafters.

26. The composition of any one of claims 16 to 25, wherein the purified bacterial population comprises one or more bacteria that are capable of producing a tryptophan metabolite.

27. The composition of any one of claims 16 to 26, wherein the purified bacterial population comprises one or more bacteria that are capable of producing a secondary bile acid.

28. The composition of any one of claims 16 to 27, wherein the purified bacterial population comprises one or more bacteria that are capable of having anti-inflammatory activity.

29. The composition of any one of claims 16 to 28, wherein the purified bacterial population comprises one or more bacteria that are not capable of inducing pro-inflammatory activity.

30. The composition of any one of claims 16 to 29, wherein the purified bacterial population comprises one or more bacteria that are capable of producing a short-chain fatty acid.

31. The composition of any one of claims 16 to 30, wherein the purified bacterial population comprises one or more bacteria that are capable of producing a medium-chain fatty acid.

32. The composition of any one of claims 16 to 31, wherein the purified bacterial population comprises one or more bacteria that are capable of inhibiting HDAC activity.

33. The composition of any one of claims 1 to 19 and 21 to 32, wherein the tryptophan metabolite comprises indole, 3-methyl indole, indoleacrylate, or any combination thereof.

34. The composition of claim 33, wherein the tryptophan metabolite is indole.

35. The composition of claim 33 or 34, wherein the tryptophan metabolite is 3-methyl indole.

36. The composition of claim 1 to 19 and 21 to 35, wherein the bacteria capable of producing a secondary bile acid has 7α-dehydroxylase activity.

37. The composition of claim 1 to 19 and 21 to 36, wherein the bacteria capable of producing a secondary bile acid has bile salt hydrolase (BSH) activity.

38. The composition of any one of claims 1 to 15, wherein the first purified bacterial population and/or the second purified bacterial population does not comprise a bacterium having 7β-hydroxysteroid dehydrogenase (7β-HSDH) activity.

39. The composition of any one of claims 16 to 38, wherein the purified bacterial population does not comprise a bacterium having 7β-hydroxysteroid dehydrogenase (7β-HSDH) activity.

40. The composition of any one of claims 1 to 19 and 21 to 39, wherein the secondary bile acid comprises deoxycholic acid (DCA), 3α 12-oxo-deoxycholic acid, 3β 12α-deoxycholic acid (3-isodeoxycholic acid), 7α 3-oxo-chenodeoxycholic acid, lithocholic acid (LCA), 3-oxo LCA, or any combination thereof.

41. The composition of any one of claims 1 to 19 and 21 to 40, wherein the bacteria capable of having anti-inflammatory activity comprises (i) bacteria capable of producing a short-chain fatty acid, (ii) bacteria capable of inhibiting histone deacetylase (HDAC) activity, (iii) bacteria capable of inhibiting TNF-α-driven IL-8 secretion in epithelial cells in vitro, or (iv) any combination thereof.

42. The composition of any one of claims 1 to 19 and 21 to 41, wherein the one or more bacteria not capable of inducing pro-inflammatory activity comprises (i) bacteria not capable of inducing IL-8 secretion in epithelial cells in vitro and/or (ii) bacteria not capable of activating Toll-like receptor 4 (TLR4) and/or Toll-like receptor 5 (TLR5) in vitro.

43. The composition of any one of claims 1 to 19 and 21 to 42, wherein the short-chain fatty acid is selected from formate, acetate, propionate, butyrate, isobutryate, valerate, isovalerate, or any combination thereof.

44. The composition of claim 43, wherein the short-chain fatty acid is propionate.

45. The composition of claim 43 or 44, wherein the short-chain fatty acid is butyrate.

46. The composition of any one of claims 1 to 19 and 21 to 45, wherein the medium-chain fatty acid comprises hexanoate, octanoate, decanoate, dodecanoate, or any combination thereof.

47. The composition of claim 46, wherein the medium-chain fatty acid is hexanoate or pentanoate.

48. The composition of any one of claims 5 to 15 and 20 to 47, wherein the long-term engrafter has a 16S rDNA sequence that is at least 97%, at least 97.5% at least 98% at least 98.5%, at least 99%, at least 99.5%, or 100% identical to a 16S rDNA sequence of a long-term engrafter provided in Table 5.

49. The composition of any one of claims 5 to 15 and 20 to 48, wherein the long-term engrafter has a 16S rDNA sequence that is at least 97%, at least 97.5%, at least 98%, at least 98.5%, at least 99%, at least 99.5%, or 100% identical to a 16S rDNA sequence set forth in SEQ ID NO: 161, SEQ ID NO: 211, SEQ ID NO: 185, SEQ ID NO: 208, SEQ ID NO: 203, SEQ ID NO: 111, SEQ ID NO: 117, SEQ ID NO: 206, SEQ ID NO: 159, SEQ ID NO: 182, SEQ ID NO: 183, SEQ ID NO: 135, SEQ ID NO: 165, SEQ ID NO: 209, SEQ ID NO: 179, SEQ ID NO: 180, SEQ ID NO: 181 or SEQ ID NO: 189.

50. The composition of any one of claims 5 to 15 and 20 to 49, wherein the transient engrafter has a 16S rDNA sequence that is at least 97%, at least 97.5%, at least 98%, at least 98.5%, at least 99%, at least 99.5%, or 100% identical to a 16S rDNA sequence of a transient engrafter provided in Table 5.

51. The composition of any one of claims 5 to 15 and 20 to 50, wherein the transient engrafter has a 16S rDNA sequence that is at least 97%, at least 97.5%, at least 98%, at least 98.5%, at least 99%, at least 99.5%, or 100% identical to a 16S rDNA sequence set forth in SEQ ID NO: 119, SEQ ID NO: 120, SEQ ID NO: 121, SEQ ID NO: 122, SEQ ID NO: 123, SEQ ID NO: 103, SEQ ID NO: 190, SEQ ID NO: 191, SEQ ID NO: 118, SEQ ID NO: 163, SEQ ID NO: 133, SEQ ID NO: 192, SEQ ID NO: 134, SEQ ID NO: 137, SEQ ID NO: 128, SEQ ID NO: 129, SEQ ID NO: 130, SEQ ID NO: 131, SEQ ID NO: 132, or SEQ ID NO: 175.

52. A composition comprising a purified bacterial population, which comprises one or more bacteria having a 16S rDNA sequence that is at least 97%, at least 97.5%, at least 98%, at least 98.5%, at least 99%, at least 99.5%, or 100% identical to a 16S rDNA sequence set forth in SEQ ID NO: 215, SEQ ID NO: 112, SEQ ID NO: 113, SEQ ID NO: 114, SEQ ID NO: 115, SEQ ID NO: 116, SEQ ID NO: 188, SEQ ID NO: 212, SEQ ID NO: 160, SEQ ID NO: 186, SEQ ID NO: 203, SEQ ID NO: 104, SEQ ID NO: 208, SEQ ID NO: 189, SEQ ID NO: 187, SEQ ID NO: 207, SEQ ID NO: 190, SEQ ID NO: 191, SEQ ID NO: 211, SEQ ID NO: 209, SEQ ID NO: 110, SEQ ID NO: 159, SEQ ID NO: 175, SEQ ID NO: 158, SEQ ID NO: 210, or SEQ ID NO: 106.

53. The composition of claim 52, wherein the purified bacterial population further comprises one or more bacteria having a 16S rDNA sequence that is at least 97%, at least 97.5%, at least 98%, at least 98.5%, at least 99%, at least 99.5%, or 100% identical to a 16S rDNA sequence set forth in SEQ ID NO: 185, SEQ ID NO: 183, SEQ ID NO: 161, SEQ ID NO: 206, SEQ ID NO: 102, SEQ ID NO: 214, SEQ ID NO: 184, SEQ ID NO: 204, SEQ ID NO: 216, SEQ ID NO: 217, SEQ ID NO: 218, SEQ ID NO: 219, SEQ ID NO: 220, SEQ ID NO: 221, SEQ ID NO: 222, SEQ ID NO: 223, SEQ ID NO: 224, SEQ ID NO: 225, SEQ ID NO: 226, SEQ ID NO: 227, SEQ ID NO: 166, SEQ ID NO: 167, SEQ ID NO: 168, SEQ ID NO: 169, SEQ ID NO: 109, SEQ ID NO: 138, SEQ ID NO: 139, SEQ ID NO: 140, SEQ ID NO: 141, SEQ ID NO: 142, SEQ ID NO: 143, SEQ ID NO: 144, SEQ ID NO: 145, SEQ ID NO: 146, SEQ ID NO: 147, SEQ ID NO: 192, SEQ ID NO: 176, SEQ ID NO: 177, SEQ ID NO: 178, SEQ ID NO: 107, SEQ ID NO: 137, SEQ ID NO: 198, SEQ ID NO: 199, SEQ ID NO: 200, SEQ ID NO: 201, SEQ ID NO: 202, SEQ ID NO: 133, SEQ ID NO: 193, SEQ ID NO: 194, SEQ ID NO: 195, SEQ ID NO: 196, SEQ ID NO: 197, SEQ ID NO: 126, SEQ ID NO: 127, SEQ ID NO: 103, SEQ ID NO: 108, SEQ ID NO: 124, SEQ ID NO: 165, SEQ ID NO: 136, SEQ ID NO: 125, SEQ ID NO: 111, SEQ ID NO: 164, SEQ ID NO: 205, SEQ ID NO: 128, SEQ ID NO: 129, SEQ ID NO: 130, SEQ ID NO: 131, SEQ ID NO: 132, SEQ ID NO: 162, SEQ ID NO: 117, SEQ ID NO: 118, SEQ ID NO: 105, SEQ ID NO: 119, SEQ ID NO: 120, SEQ ID NO: 121, SEQ ID NO: 122, SEQ ID NO: 123, SEQ ID NO: 170, SEQ ID NO: 171, SEQ ID NO: 172, SEQ ID NO: 173, SEQ ID NO: 174, SEQ ID NO: 163, SEQ ID NO: 182, SEQ ID NO: 135, SEQ ID NO: 134, SEQ ID NO: 179, SEQ ID NO: 180, SEQ ID NO: 181, or SEQ ID NO: 213.

54. A composition comprising a purified bacterial population comprising 16S rDNA sequences that are at least 97%, at least 97.5%, at least 98%, at least 98.5%, at least 99%, at least 99.5%, or 100% identical to a 16S rDNA sequence selected from the group consisting of:
(1) SEQ ID NO: 112, SEQ ID NO: 113, SEQ ID NO: 114, SEQ ID NO: 115, SEQ ID NO: 116, SEQ ID NO: 188, SEQ ID NO: 186, SEQ ID NO: 104, SEQ ID NO: 187;
(2) SEQ ID NO: 186;
(3) SEQ ID NO: 112, SEQ ID NO: 113, SEQ ID NO: 114, SEQ ID NO: 115, SEQ ID NO: 116, SEQ ID NO: 188, SEQ ID NO: 186, SEQ ID NO: 104, SEQ ID NO: 190, SEQ ID NO: 191, SEQ ID NO: 175;
(4) SEQ ID NO: 112, SEQ ID NO: 113, SEQ ID NO: 114, SEQ ID NO: 115, SEQ ID NO: 116, SEQ ID NO: 188, SEQ ID NO: 186, SEQ ID NO: 203, SEQ ID NO: 104;
(5) SEQ ID NO: 112, SEQ ID NO: 113, SEQ ID NO: 114, SEQ ID NO: 115, SEQ ID NO: 116, SEQ ID NO: 186, SEQ ID NO: 203, SEQ ID NO: 190, SEQ ID NO: 191, SEQ ID NO: 175;
(6) SEQ ID NO: 112, SEQ ID NO: 113, SEQ ID NO: 114, SEQ ID NO: 115, SEQ ID NO: 116 or SEQ ID NO: 104;
(7) SEQ ID NO: 112, SEQ ID NO: 113, SEQ ID NO: 114, SEQ ID NO: 115, SEQ ID NO: 116, SEQ ID NO: 104, SEQ ID NO: 190, SEQ ID NO: 191, SEQ ID NO: 175;
(8) SEQ ID NO: 112, SEQ ID NO: 113, SEQ ID NO: 114, SEQ ID NO: 115, SEQ ID NO: 116, SEQ ID NO: 203, SEQ ID NO: 104;
(9) SEQ ID NO: 112, SEQ ID NO: 113, SEQ ID NO: 114, SEQ ID NO: 115, SEQ ID NO: 116, SEQ ID NO: 203, SEQ ID NO: 190, SEQ ID NO: 191, SEQ ID NO: 175;
(10) SEQ ID NO: 159; SEQ ID NO: 190, SEQ ID NO: 191, SEQ ID NO: 211;
(11) SEQ ID NO: 212, SEQ ID NO: 203, SEQ ID NO: 189, SEQ ID NO: 190, SEQ ID NO: 191, SEQ ID NO: 211, SEQ ID NO: 159, SEQ ID NO: 175, SEQ ID NO: 210;
(12) SEQ ID NO: 212, SEQ ID NO: 203, SEQ ID NO: 189, SEQ ID NO: 190, SEQ ID NO: 191, SEQ ID NO: 211, SEQ ID NO: 159, SEQ ID NO: 175;
(13) SEQ ID NO: 212, SEQ ID NO: 203, SEQ ID NO: 189, SEQ ID NO: 190, SEQ ID NO: 191, SEQ ID NO: 211, SEQ ID NO: 159;
(14) SEQ ID NO: 212, SEQ ID NO: 203, SEQ ID NO: 190, SEQ ID NO: 191, SEQ ID NO: 211, SEQ ID NO: 159;
(15) SEQ ID NO: 203, SEQ ID NO: 189, SEQ ID NO: 211, SEQ ID NO: 175;
(16) SEQ ID NO: 203, SEQ ID NO: 190, SEQ ID NO: 191, SEQ ID NO: 211, SEQ ID NO: 175;
(17) SEQ ID NO: 203, SEQ ID NO: 189, SEQ ID NO: 190, SEQ ID NO: 191, SEQ ID NO: 211, SEQ ID NO: 175;
(18) SEQ ID NO: 203, SEQ ID NO: 208, SEQ ID NO: 190, SEQ ID NO: 191, SEQ ID NO: 211, SEQ ID NO: 159, SEQ ID NO: 175;
(19) SEQ ID NO: 203, SEQ ID NO: 190, SEQ ID NO: 191, SEQ ID NO: 211, SEQ ID NO: 159, SEQ ID NO: 175;
(20) SEQ ID NO: 203, SEQ ID NO: 208, SEQ ID NO: 190, SEQ ID NO: 191, SEQ ID NO: 211, SEQ ID NO: 159, SEQ ID NO: 175;
(21) SEQ ID NO: 203, SEQ ID NO: 208, SEQ ID NO: 189, SEQ ID NO: 190, SEQ ID NO: 191, SEQ ID NO: 211, SEQ ID NO: 159, SEQ ID NO: 175;
(22) SEQ ID NO: 203, SEQ ID NO: 208, SEQ ID NO: 190, SEQ ID NO: 191, SEQ ID NO: 211, SEQ ID NO: 209, SEQ ID NO: 159;
(23) SEQ ID NO: 203, SEQ ID NO: 190, SEQ ID NO: 191, SEQ ID NO: 211, SEQ ID NO: 209, SEQ ID NO: 159;
(24) SEQ ID NO: 215, SEQ ID NO: 160, SEQ ID NO: 158, SEQ ID NO: 106; and
(25) any combination thereof.

55. The composition of claim 54, wherein the purified bacterial population further comprises 16S rDNA sequences that are at least 97%, at least 97.5%, at least 98%, at least 98.5%, at least 99%, at least 99.5%, or 100% identical to a 16S rDNA sequence selected from the group consisting of:
(1) SEQ ID NO: 184, SEQ ID NO: 204, SEQ ID NO: 216, SEQ ID NO: 217, SEQ ID NO: 218, SEQ ID NO: 219, SEQ ID NO: 220, SEQ ID NO: 221, SEQ ID NO: 222, SEQ ID NO: 223, SEQ ID NO: 224, SEQ ID NO: 225, SEQ ID NO: 226, SEQ ID NO: 227, SEQ ID NO: 198, SEQ ID NO: 199, SEQ ID NO: 200, SEQ ID NO: 201, SEQ ID NO: 202, SEQ ID NO: 126, SEQ ID NO: 127, SEQ ID NO: 103, SEQ ID NO: 128, SEQ ID NO: 129, SEQ ID NO: 130, SEQ ID NO: 131, SEQ ID NO: 132, SEQ ID NO: 162, SEQ ID NO: 119, SEQ ID NO: 120, SEQ ID NO: 121, SEQ ID NO: 122, SEQ ID NO: 123;
(2) SEQ ID NO: 204, SEQ ID NO: 103;
(3) SEQ ID NO: 204, SEQ ID NO: 103, SEQ ID NO: 205;
(4) SEQ ID NO: 185, SEQ ID NO: 204, SEQ ID NO: 176, SEQ ID NO: 177, SEQ ID NO: 178, SEQ ID NO: 117;
(5) SEQ ID NO: 184, SEQ ID NO: 204, SEQ ID NO: 198, SEQ ID NO: 199, SEQ ID NO: 200, SEQ ID NO: 201, SEQ ID NO: 202, SEQ ID NO: 103, SEQ ID NO: 162, SEQ ID NO: 134;
(6) SEQ ID NO: 184, SEQ ID NO: 204, SEQ ID NO: 198, SEQ ID NO: 199, SEQ ID NO: 200, SEQ ID NO: 201, SEQ ID NO: 202, SEQ ID NO: 103, SEQ ID NO: 165, SEQ ID NO: 162, SEQ ID NO: 182;
(7) SEQ ID NO: 184, SEQ ID NO: 204, SEQ ID NO: 103, SEQ ID NO: 165, SEQ ID NO: 162, SEQ ID NO: 182, SEQ ID NO: 134;
(8) SEQ ID NO: 184, SEQ ID NO: 204, SEQ ID NO: 166, SEQ ID NO: 167, SEQ ID NO: 168, SEQ ID NO: 169, SEQ ID NO: 176, SEQ ID NO: 177, SEQ ID NO: 178, SEQ ID NO: 137, SEQ ID NO: 103, SEQ ID NO: 128, SEQ ID NO: 129, SEQ ID NO: 130, SEQ ID NO: 131, SEQ ID NO: 132, SEQ ID NO: 162, SEQ ID NO: 118, SEQ ID NO: 119, SEQ ID NO: 120, SEQ ID NO: 121, SEQ ID NO: 122, SEQ ID NO: 123;
(9) SEQ ID NO: 184, SEQ ID NO: 204, SEQ ID NO: 166, SEQ ID NO: 167, SEQ ID NO: 168, SEQ ID NO: 169, SEQ ID NO: 176, SEQ ID NO: 177, SEQ ID NO: 178, SEQ ID NO: 137, SEQ ID NO: 103, SEQ ID NO: 162, SEQ ID NO: 118, SEQ ID NO: 134;
(10) SEQ ID NO: 184, SEQ ID NO: 204, SEQ ID NO: 166, SEQ ID NO: 167, SEQ ID NO: 168, SEQ ID NO: 169, SEQ ID NO: 176, SEQ ID NO: 177, SEQ ID NO: 178, SEQ ID NO: 137, SEQ ID NO: 103, SEQ ID NO: 162, SEQ ID NO: 118, SEQ ID NO: 182
(11) SEQ ID NO: 184, SEQ ID NO: 204, SEQ ID NO: 166, SEQ ID NO: 167, SEQ ID NO: 168, SEQ ID NO: 169, SEQ ID NO: 176, SEQ ID NO: 177, SEQ ID NO: 178, SEQ ID NO: 137, SEQ ID NO: 103, SEQ ID NO: 162, SEQ ID NO: 118, SEQ ID NO: 182, SEQ ID NO: 134;
(12) SEQ ID NO: 111, SEQ ID NO: 135, SEQ ID NO: 134;
(13) SEQ ID NO: 166, SEQ ID NO: 167, SEQ ID NO: 168, SEQ ID NO: 169, SEQ ID NO: 176, SEQ ID NO: 177, SEQ ID NO: 178, SEQ ID NO: 137, SEQ ID NO: 111, SEQ ID NO: 135, SEQ ID NO: 134;
(14) SEQ ID NO: 183, SEQ ID NO: 204, SEQ ID NO: 166, SEQ ID NO: 167, SEQ ID NO: 168, SEQ ID NO: 169, SEQ ID NO: 176, SEQ ID NO: 177, SEQ ID NO: 178, SEQ ID NO: 137, SEQ ID NO: 133, SEQ ID NO: 103, SEQ ID NO: 111, SEQ ID NO: 118, SEQ ID NO: 163, SEQ ID NO: 135, SEQ ID NO: 134;
(15) SEQ ID NO: 166, SEQ ID NO: 167, SEQ ID NO: 168, SEQ ID NO: 169, SEQ ID NO: 176, SEQ ID NO: 177, SEQ ID NO: 178, SEQ ID NO: 137, SEQ ID NO: 193, SEQ ID NO: 194, SEQ ID NO: 195, SEQ ID NO: 196, SEQ ID NO: 197, SEQ ID NO: 111, SEQ ID NO: 118, SEQ ID NO: 170, SEQ ID NO: 171, SEQ ID NO: 172, SEQ ID NO: 173, SEQ ID NO: 174, SEQ ID NO: 135, SEQ ID NO: 134;
(16) SEQ ID NO: 133, SEQ ID NO: 111, SEQ ID NO: 128, SEQ ID NO: 129, SEQ ID NO: 130, SEQ ID NO: 131, SEQ ID NO: 132, SEQ ID NO: 119, SEQ ID NO: 120, SEQ ID NO: 121, SEQ ID NO: 122, SEQ ID NO: 123, SEQ ID NO: 182, SEQ ID NO: 135, SEQ ID NO: 134;
(17) SEQ ID NO: 111, SEQ ID NO: 182, SEQ ID NO: 135, SEQ ID NO: 134;
(18) SEQ ID NO: 166, SEQ ID NO: 167, SEQ ID NO: 168, SEQ ID NO: 169, SEQ ID NO: 176, SEQ ID NO: 177, SEQ ID NO: 178, SEQ ID NO: 137, SEQ ID NO: 111, SEQ ID NO: 118, SEQ ID NO: 182, SEQ ID NO: 135, SEQ ID NO: 134;
(19) SEQ ID NO: 184, SEQ ID NO: 166, SEQ ID NO: 167, SEQ ID NO: 168, SEQ ID NO: 169, SEQ ID NO: 176, SEQ ID NO: 177, SEQ ID NO: 178, SEQ ID NO: 137, SEQ ID NO: 111, SEQ ID NO: 118, SEQ ID NO: 135, SEQ ID NO: 134;
(20) SEQ ID NO: 183, SEQ ID NO: 166, SEQ ID NO: 167, SEQ ID NO: 168, SEQ ID NO: 169, SEQ ID NO: 176, SEQ ID NO: 177, SEQ ID NO: 178, SEQ ID NO: 137, SEQ ID NO: 136, SEQ ID NO: 111, SEQ ID NO: 118, SEQ ID NO: 119, SEQ ID NO: 120, SEQ ID NO: 121, SEQ ID NO: 122, SEQ ID NO: 123, SEQ ID NO: 135, SEQ ID NO: 134;
(21) SEQ ID NO: 185, SEQ ID NO: 183, SEQ ID NO: 161, SEQ ID NO: 206, SEQ ID NO: 137, SEQ ID NO: 133, SEQ ID NO: 103, SEQ ID NO: 111, SEQ ID NO: 117, SEQ ID NO: 119, SEQ ID NO: 120, SEQ ID NO: 121, SEQ ID NO: 122, SEQ ID NO: 123, SEQ ID NO: 163
(22) SEQ ID NO: 183, SEQ ID NO: 161, SEQ ID NO: 206, SEQ ID NO: 137, SEQ ID NO: 103, SEQ ID NO: 111, SEQ ID NO: 117, SEQ ID NO: 118, SEQ ID NO: 119, SEQ ID NO: 120, SEQ ID NO: 121, SEQ ID NO: 122, SEQ ID NO: 123, SEQ ID NO: 163, SEQ ID NO: 134;
(23) SEQ ID NO: 185, SEQ ID NO: 183, SEQ ID NO: 137, SEQ ID NO: 103, SEQ ID NO: 111, SEQ ID NO: 117, SEQ ID NO: 118, SEQ ID NO: 119, SEQ ID NO: 120, SEQ ID NO: 121, SEQ ID NO: 122, SEQ ID NO: 123, SEQ ID NO: 163, SEQ ID NO: 134;
(24) SEQ ID NO: 206, SEQ ID NO: 137, SEQ ID NO: 103, SEQ ID NO: 111, SEQ ID NO: 117, SEQ ID NO: 118, SEQ ID NO: 119, SEQ ID NO: 120, SEQ ID NO: 121, SEQ ID NO: 122, SEQ ID NO: 123, SEQ ID NO: 182, SEQ ID NO: 135;
(25) SEQ ID NO: 185, SEQ ID NO: 183, SEQ ID NO: 206, SEQ ID NO: 192, SEQ ID NO: 137, SEQ ID NO: 103, SEQ ID NO: 165, SEQ ID NO: 111, SEQ ID NO: 117, SEQ ID NO: 118, SEQ ID NO: 163;
(26) SEQ ID NO: 185, SEQ ID NO: 183, SEQ ID NO: 206, SEQ ID NO: 137, SEQ ID NO: 103, SEQ ID NO: 111, SEQ ID NO: 117, SEQ ID NO: 118, SEQ ID NO: 119, SEQ ID NO: 120, SEQ ID NO: 121, SEQ ID NO: 122, SEQ ID NO: 123, SEQ ID NO: 163, SEQ ID NO: 182;
(27) SEQ ID NO: 206, SEQ ID NO: 137, SEQ ID NO: 103, SEQ ID NO: 165, SEQ ID NO: 111, SEQ ID NO: 117, SEQ ID NO: 118, SEQ ID NO: 119, SEQ ID NO: 120, SEQ ID NO: 121, SEQ ID NO: 122, SEQ ID NO: 123, SEQ ID NO: 163, SEQ ID NO: 182;
(28) SEQ ID NO: 185, SEQ ID NO: 183, SEQ ID NO: 206, SEQ ID NO: 137, SEQ ID NO: 103, SEQ ID NO: 165, SEQ ID NO: 111, SEQ ID NO: 117, SEQ ID NO: 119, SEQ ID NO: 120, SEQ ID NO: 121, SEQ ID NO: 122, SEQ ID NO: 123, SEQ ID NO: 163, SEQ ID NO: 182, SEQ ID NO: 135;
(29) SEQ ID NO: 185, SEQ ID NO: 161, SEQ ID NO: 206, SEQ ID NO: 137, SEQ ID NO: 133, SEQ ID NO: 103, SEQ ID NO: 111, SEQ ID NO: 117, SEQ ID NO: 118, SEQ ID NO: 119, SEQ ID NO: 120, SEQ ID NO: 121, SEQ ID NO: 122, SEQ ID NO: 123, SEQ ID NO: 163, SEQ ID NO: 182, SEQ ID NO: 135;
(30) SEQ ID NO: 185, SEQ ID NO: 183, SEQ ID NO: 206, SEQ ID NO: 192, SEQ ID NO: 137, SEQ ID NO: 133, SEQ ID NO: 103, SEQ ID NO: 165, SEQ ID NO: 111, SEQ ID NO: 117, SEQ ID NO: 118, SEQ ID NO: 119, SEQ ID NO: 120, SEQ ID NO: 121, SEQ ID NO: 122, SEQ ID NO: 123, SEQ ID NO: 163;
(31) SEQ ID NO: 185, SEQ ID NO: 183, SEQ ID NO: 206, SEQ ID NO: 137, SEQ ID NO: 103, SEQ ID NO: 111, SEQ ID NO: 117, SEQ ID NO: 118, SEQ ID NO: 119, SEQ ID NO: 120, SEQ ID NO: 121, SEQ ID NO: 122, SEQ ID NO: 123, SEQ ID NO: 163, SEQ ID NO: 182, SEQ ID NO: 135;
(32) SEQ ID NO: 185, SEQ ID NO: 183, SEQ ID NO: 161, SEQ ID NO: 206, SEQ ID NO: 192, SEQ ID NO: 137, SEQ ID NO: 133, SEQ ID NO: 103, SEQ ID NO: 165, SEQ ID NO: 111, SEQ ID NO: 117, SEQ ID NO: 118, SEQ ID NO: 119, SEQ ID NO: 120, SEQ ID NO: 121, SEQ ID NO: 122, SEQ ID NO: 123, SEQ ID NO: 163, SEQ ID NO: 182, SEQ ID NO: 135, SEQ ID NO: 134;
(33) SEQ ID NO: 185, SEQ ID NO: 183, SEQ ID NO: 161, SEQ ID NO: 206, SEQ ID NO: 192, SEQ ID NO: 137, SEQ ID NO: 103, SEQ ID NO: 165, SEQ ID NO: 111, SEQ ID NO: 128, SEQ ID NO: 129, SEQ ID NO: 130, SEQ ID NO: 131, SEQ ID NO: 132, SEQ ID NO: 117, SEQ ID NO: 118, SEQ ID NO: 119, SEQ ID NO: 120, SEQ ID NO: 121, SEQ ID NO: 122, SEQ ID NO: 123, SEQ ID NO: 163, SEQ ID NO: 182, SEQ ID NO: 134, SEQ ID NO: 179, SEQ ID NO: 180, SEQ ID NO: 181;
(34) SEQ ID NO: 185, SEQ ID NO: 161, SEQ ID NO: 206, SEQ ID NO: 137, SEQ ID NO: 103, SEQ ID NO: 111, SEQ ID NO: 128, SEQ ID NO: 129, SEQ ID NO: 130, SEQ ID NO: 131, SEQ ID NO: 132, SEQ ID NO: 117, SEQ ID NO: 118, SEQ ID NO: 119, SEQ ID NO: 120, SEQ ID NO: 121, SEQ ID NO: 122, SEQ ID NO: 123, SEQ ID NO: 163, SEQ ID NO: 182, SEQ ID NO: 179, SEQ ID NO: 180, SEQ ID NO: 181;
(35) SEQ ID NO: 102, SEQ ID NO: 216, SEQ ID NO: 217, SEQ ID NO: 218, SEQ ID NO: 219, SEQ ID NO: 220, SEQ ID NO: 221, SEQ ID NO: 222, SEQ ID NO: 223, SEQ ID NO: 224, SEQ ID NO: 225, SEQ ID NO: 226, SEQ ID NO: 227, SEQ ID NO: 166, SEQ ID NO: 167, SEQ ID NO: 168, SEQ ID NO: 169, SEQ ID NO: 109, SEQ ID NO: 107, SEQ ID NO: 103, SEQ ID NO: 108, SEQ ID NO: 117, SEQ ID NO: 105, SEQ ID NO: 179, SEQ ID NO: 180, SEQ ID NO: 181; and
(36) any combination thereof.

56. The composition of any one of claims 1 to 55, further comprising one or more enteric polymers.

57. A pharmaceutical formulation comprising the composition of any one of claims 1 to 56, and a pharmaceutically acceptable excipient.

58. The pharmaceutical formulation of claim 57, wherein the excipient is glycerol.

59. The pharmaceutical formulation of claim 57, wherein the composition is lyophilized.

60. The pharmaceutical formulation of claim 57, wherein the composition is formulated for oral delivery.

61. A method of treating an inflammatory disease in a subject in need thereof, comprising administering to the subject an effective amount of a composition of any one of claims 1 to 60.

62. The method of claim 61, wherein administering the effective amount of the composition ameliorates one or more signs or symptoms of the inflammatory disease or maintains a remission of the inflammatory disease.

63. The method of claim 61 or 62, wherein the inflammatory disease comprises an inflammatory bowel disease.

64. The method of claim 63, wherein the inflammatory bowel disease comprises Crohn's disease, autoimmune-mediated gastrointestinal diseases, gastrointestinal inflammation, or colitis, such as ulcerative colitis, colitis ulcerosa, microscopic colitis, collagenous colitis, colitis polyposa, necrotizing enterocolitis, transmural colitis, or any combination thereof.

65. Use of a composition of any one of claims 1 to 60 in the manufacture of a medicament for treating an inflammatory disease in a subject in need thereof.

66. A composition of any one of claims 1 to 60 for use in a method of treating an inflammatory disease, comprising administering the composition to the subject.

67. A method of modulating the level of a biological molecule in a subject in need thereof, comprising administering to the subject an effective amount of a composition of any one of claims 1 to 60.

68. The method of claim 67, wherein the biological molecule comprises a fecal calprotectin, a secondary bile acid, a tryptophan metabolite, a short-chain fatty acid, a medium-chain fatty acid, a sphingolipid, a kynurenine, or any combination thereof.

69. The method of claim 68, wherein the level of fecal calprotectin is reduced by at least about 10%, at least about 20%, at least about 30%, at least about 40%, at least about 50%, at least about 60%, at least about 70%, at least about 80%, or at least about 90% in the subject compared to a corresponding level in a reference.

70. The method of claim 68 or 69, wherein the level of a secondary bile acid is increased by at least about 10%, at least about 20%, at least about 30%, at least about 40%, at least about 50%, at least about 60%, at least about 70%, at least about 80%, or at least about 90% in the subject compared to a corresponding level in a reference.

71. The method of claim 70, wherein the secondary bile acid comprises deoxycholic acid (DCA), 3α 12-oxo-deoxycholic acid, 3β 12α-deoxycholic acid (3-isodeoxycholic acid), 7α 3-oxo-chenodeoxycholic acid, lithocholic acid (LCA), 3-oxo LCA, or any combination thereof.

72. The method of any one of claims 68 to 71, wherein the level of a tryptophan metabolite is increased by at least about 10%, at least about 20%, at least about 30%, at least about 40%, at least about 50%, at least about 60%, at least about 70%, at least about 80%, or at least about 90% in the subject compared to a corresponding level in a reference.

73. The method of claim 72, wherein the tryptophan metabolite is selected from the group consisting of indole, 3-methylindole, and combinations thereof.

74. The method of any one of claims 68 to 73, wherein the level of a short-chain fatty acid is increased by at least about 10%, at least about 20%, at least about 30%, at least about 40%, at least about 50%, at least about 60%, at least about 70%, at least about 80%, or at least about 90% in the subject compared to a corresponding level in a reference.

75. The method of claim 74, wherein the short-chain fatty acid is selected from formate, acetate, propionate, butyrate, isobutryate, valerate, isovalerate, or any combination thereof.

76. The method of any one of claims 68 to 75, wherein the reference is a predetermined level or a level in the subject prior to the administration.

77. The method of any one of claims 68 to 76, wherein the modulation of the biological molecule is associated with remission of an inflammatory disease.

78. A method of treating a cancer in a subject in need thereof, comprising administering to the subject an effective amount of a composition of any one of claims 1 to 60.

79. Use of a composition of any one of claims 1 to 60 in the manufacture of a medicament for treating a cancer in a subject in need thereof.

80. A composition of any one of claims 1 to 60 for use in a method of treating a cancer, comprising administering the composition to the subject.

81. A method for inhibiting a growth of a tumor or reducing the size of a tumor in a subject in need thereof, comprising administering to the subject an effective amount of a composition of any one of claims 1 to 60.

82. Use of a composition of any one of claims 1 to 60 in the manufacture of a medicament for inhibiting a growth of a tumor or reducing the size of a tumor in a subject in need thereof.

83. A composition of any one of claims 1 to 60 for use in a method of treating a cancer, comprising administering the composition to the subject.

84. A method of enhancing an immune response in a subject in need thereof, comprising administering to the subject an effective amount of a composition of any one of claims 1 to 60.

85. Use of a composition of any one of claims 1 to 60 in the manufacture of a medicament for enhancing an immune response in a subject in need thereof.

86. A composition of any one of claims 1 to 60 for use in a method of enhancing an immune response in a subject in need thereof.

87. The method, the use, or the composition for use of any one of claims 81 to 83, wherein the subject has a cancer.

88. The method, the use, or the composition for use of any one of claims 78 to 83 or 87, further comprising administering an additional therapeutic agent to the subject.

89. The method, the use, or the composition for use of claim 88, wherein the additional therapeutic agent comprises an immune checkpoint inhibitor.

90. The method, the use, or the composition for use of claim 89, wherein the immune checkpoint inhibitor is selected from an anti-PD-1 antibody, an anti-PD-L1 antibody, an anti-CTLA-4 antibody, or a combination thereof.

91. The method, the use, or the composition for use of any one of claims 78 to 83 or 87 to 90, wherein the cancer comprises a bladder cancer, breast cancer, uterine/cervical cancer, ovarian cancer, prostate cancer, testicular cancer, esophageal cancer, gastrointestinal cancer, pancreatic cancer, colorectal cancer, colon cancer, kidney cancer, head and neck cancer, lung cancer, stomach cancer, germ cell cancer, bone cancer, liver cancer, thyroid cancer, skin cancer, neoplasm of the central nervous system, lymphoma, leukemia, myeloma, sarcoma, virus-related cancer, or any combination thereof.

92. The method, the use, or the composition for use of claim 78 to 83 and 87 to 91 wherein the administering results in increased number of tumor infiltrating lymphocytes in a tumor of the subject.

93. The method, the use, or the composition for use of claim 92, wherein the number of tumor infiltrating lymphocytes in the tumor is increased by at least about 5%, at least about 10%, at least about 20%, at least about 30%, at least about 40%, at least about 50%, at least about 60%, at least about 70%, at least about 80%, or at least about 90% or more compared to a reference.

94. The method, the use, or the composition for use of claim 93, wherein the reference comprises the number of tumor infiltrating lymphocytes in a tumor of a subject that did not receive the composition.
